(19) United States
(12) Patent Application Publication
(10) Pub. No.: US 2019/0040411 A1
(43) Pub. Date: Feb. 7, 2019

(54) PESTICIDAL GENES AND METHODS OF USE

(71) Applicant: AgBiome, Inc., Durham, NC (US)

(72) Inventors: Jessica Parks, Raleigh, NC (US); Kira Bulazel Roberts, Bahama, NC (US); Rebecca E. Thayer, Morrisville, NC (US)

(73) Assignee: AgBiome, Inc., Durham, NC (US)

(21) Appl. No.: 16/053,002

(22) Filed: Aug. 2, 2018

Related U.S. Application Data
(60) Provisional application No. 62/540,753, filed on Aug. 3, 2017.
(60) Provisional application No. 62/672,193, filed on May 16, 2018.

(51) Int. Cl. C12N 15/82; C07K 14/00

(52) U.S. Cl. CPC C12N 15/8286; C07K 14/001

(57) ABSTRACT

Compositions having pesticidal activity and methods for their use are provided. Compositions include isolated and recombinant polypeptide sequences having pesticidal activity, recombinant and synthetic nucleic acid molecules encoding the pesticidal polypeptides, DNA constructs comprising the nucleic acid molecules, vectors comprising the nucleic acid molecules, host cells comprising the vectors, and antibodies to the pesticidal polypeptides. Nucleotide sequences encoding the polypeptides provided herein can be used in DNA constructs or expression cassettes for transformation and expression in organisms of interest, including microorganisms and plants. The compositions and methods provided herein are useful for production of organisms with enhanced pest resistance or tolerance. Transgenic plants and seeds comprising a nucleotide sequence that encodes a pesticidal protein of the invention are also provided. Such plants are resistant to insects and other pests. Methods are provided for producing the various polypeptides disclosed herein, and for using those polypeptides for controlling or killing a pest.

### CROSS REFERENCE TO RELATED APPLICATIONS

[0001] The present application claims priority to U.S. Provisional Patent Application No. 62/540,753, filed Aug. 3, 2017, and U.S. Provisional Application No. 62/672,193, filed May 16, 2018, the disclosures of which are incorporated herein by reference.

### FIELD OF THE INVENTION

[0002] The invention is drawn to methods and compositions for controlling pests, particularly plant pests.

### BACKGROUND

[0003] Pests, plant diseases, and weeds can be serious threats to crops. Losses due to pests and diseases have been estimated at 37% of the agricultural production worldwide, with 13% due to insects, bacteria and other organisms.

[0004] Toxins are virulence determinants that play an important role in microbial pathogenicity and/or evasion of the host immune response. Toxins from the gram-positive bacterium Bacillus, particularly Bacillus thuringensis, have been used as insecticidal proteins. Current strategies use the genes expressing these toxins to produce transgenic crops. Transgenic crops expressing insecticidal protein toxins are used to combat crop damage from insects.

[0005] While the use of Bacillus toxins has been successful in controlling insects, resistance to Bt toxins has developed in some target pests in many parts of the world where such toxins have been used intensively. One way of solving this problem is sowing Bt crops with alternating rows of regular non Bt crops (refuge). An alternative method to avoid or slow down development of insect resistance is stacking insecticidal genes with different modes of action against insects in transgenic plants. The current strategy of using transgenic crops expressing insecticidal protein toxins is placing increasing emphasis on the discovery of novel toxins, beyond those already derived from the bacterium Bacillus thuringiensis. These toxins may prove useful as alternatives to those derived from B. thuringiensis for deployment in insect- and pest-resistant transgenic plants. Thus, new toxin proteins are needed.

### SUMMARY

[0006] Compositions having pesticidal activity and methods for their use are provided. Compositions include isolated and recombinant polypeptide sequences having pesticidal activity, recombinant and synthetic nucleic acid molecules encoding the pesticidal polypeptides, DNA constructs comprising the nucleic acid molecules, vectors comprising the nucleic acid molecules, host cells comprising the vectors, and antibodies to the pesticidal polypeptides. Nucleotide sequences encoding the polypeptides provided herein can be used in DNA constructs or expression cassettes for transformation and expression in organisms of interest, including microorganisms and plants.

[0007] The compositions and methods provided herein are useful for the production of organisms with enhanced pest resistance or tolerance. These organisms and compositions comprising the organisms are desirable for agricultural purposes. Transgenic plants and seeds comprising a nucleotide sequence that encodes a pesticidal protein of the invention are also provided. Such plants are resistant to insects and other pests.

[0008] Methods are provided for producing the various polypeptides disclosed herein, and for using those polypeptides for controlling or killing a pest. Methods and kits for detecting polypeptides of the invention in a sample are also included.

### DETAILED DESCRIPTION OF THE INVENTION

[0009] The present inventions now will be described more fully hereinafter with reference to the accompanying drawings, in which some, but not all embodiments of the inventions are shown. Indeed, these inventions may be embodied in many different forms and should not be construed as limited to the embodiments set forth herein; rather, these embodiments are provided so that this disclosure will satisfy applicable legal requirements. Like numbers refer to like elements throughout.

[0010] Many modifications and other embodiments of the inventions set forth herein will come to mind to one skilled in the art to which these inventions pertain having the benefit of the teachings presented in the foregoing descriptions and the associated drawings. Therefore, it is to be understood that the inventions are not to be limited to the specific embodiments disclosed and that modifications and other embodiments are intended to be included within the scope of the appended claims. Although specific terms are employed herein, they are used in a generic and descriptive sense only and not for purposes of limitation.

### I. Polynucleotides and Polypeptides

[0011] Compositions and method for conferring pesticidal activity to an organism are provided. The modified organism exhibits pesticidal resistance or tolerance. Recombinant pesticidal proteins, or polypeptides and fragments and variants thereof that retain pesticidal activity, are provided and include those set forth in SEQ ID NOs: 1, 2, 3, 4, 5, 6, 7, 8, 9, 10, 11, 12, 13, 14, 15, 16, 17, 18, 19, 20, 21, 22, 23, 24, 25, 26, 27, 28, 29, 30, 31, 32, 33, 34, 35, 36, 37, 38, 39, 40, 41, 42, 43, 44, 45, 46, 47, 48, 49, 50, 51, 52, 53, 54, 55, 56, 57, 58, 59, 60, 61, 62, 63, 64, 65, 66, 67, 68, 69, 70, 71, 72, 73, 74, 75, 76, 77, 78, 79, 80, 81, 82, 83, 84, 85, 86, 87, 88, 89, 90, 91, 92, 93, 94, 95, 96, 97, 98, 99, 100, 101, 102, 103, 104, 105, 106, 107, 108, 109, 110, 111, 112, 113, 114, 115, 116, 117, 118, 119, 120, 121, 122, 123, 124, 125, 126, 127, 128, 129, 130, 131, 132, 133, 134, 135, 136, 137, 138, 139, 140, 141, 142, 143, 144, 145, 146, 147, 148, 149, 150, 151, 152, 153, 154, 155, 156, 157, 158, 159, 160, 161, 162, 163, 164, 165, 166, 167, 168, 169, 170, 171, 172, 173, 174, 175, 176, 177, 178, 179, 180, 181, 182, 183, 184, 185, 186, 187, 188, 189, 190, 191, 192, 193, 194, 195, 196, 197, 198, 199, 200, 201, 202, 203, 204, 205, 206, 207, 208, 209, 210, 211, 212, 213, 214, 215, 216, 217, 218, 219, 220, 221, 222, 223, 224, 225, 226, 227, 228, 229, 230, 231, 232, 233, 234, 235, 236, 237, 238, 239, 240, 241, 242, 243, 244, 245, 246, 247, 248, 249, 250, 251, 252, 253, 254, 255, 256, 257, 258, 259, 260, 261, 262, 263, 264, 265, 266, 267, 268, 269, 270, 271, 272, 273, 274, 275, 276, 277, 278, 279, 280, 281, 282, 283, 284, 285, 286, 287, 288, 289, 290, 291, 292, 293, 294, 295, 296, 297, 298, 299, 300, 301, 302, 303, 304, 305, 306, 307, 308, 309, 310, 311, 312, 313, 314, 315, 316, 317, 318, 319, 320, 321, 322, 323, 324, 325, 326, 327, 328, 329, 330, 331, 332, 333, 334, 335, 336, 337, 338, 339, 340, 341, 342, 343, 344, 345, 346, 347, 348, 349, 350, 351, 352, 353, 354, 355, 356, 357, 358, 359, 360, 361, 362, 363, 364, 365, 366, 367, 368, 369, 370, 371, 372, 373, 374, 375, 376, 377, 378, 379, 380, 381, 382, 383, 384, 385, 386, 387, 388, 389, 390, 391, 392, and/or 393. The pesticidal proteins are biologically active (e.g., pesticidal) against pests including insects, fungi, nematodes, and the like. Nucleotides encoding the pesticidal polypeptides, including for example, SEQ ID NOS: 1, 2, 3, 4, 5, 6, 7, 8, 9, 10, 11, 12, 13, 14, 15, 16, 17, 18, 19, 20, 21, 22, 23, 24, 25, 26, 27, 28, 29, 30, 31, 32, 33, 34, 35, 36, 37, 38, 39, 40, 41, 42, 43, 44, 45, 46, 47, 48, 49, 50, 51, 52, 53, 54, 55, 56, 57, 58, 59, 60, 61, 62, 63, 64, 65, 66, 67, 68, 69, 70, 71, 72, 73, 74, 75, 76, 77, 78, 79, 80, 81, 82, 83, 84, 85, 86, 87, 88, 89, 90, 91, 92, 93, 94, 95, 96, 97, 98, 99, 100, 101, 102, 103, 104, 105, 106, 107, 108, 109, 110, 111, 112, 113, 114, 115, 116, 117, 118, 119, 120, 121, 122, 123, 124, 125, 126, 127, 128, 129, 130, 131, 132, 133, 134, 135, 136, 137, 138, 139, 140, 141, 142, 143, 144, 145, 146, 147, 148, 149, 150, 151, 152, 153, 154, 155, 156, 157, 158, 159, 160, 161, 162, 163, 164, 165, 166, 167, 168, 169, 170, 171, 172, 173, 174, 175, 176, 177, 178, 179, 180, 181, 182, 183, 184, 185, 186, 187, 188, 189, 190, 191, 192, 193, 194, 195, 196, 197, 198, 199, 200, 201, 202, 203, 204, 205, 206, 207, 208, 209, 210, 211, 212, 213, 214, 215, 216, 217, 218, 219, 220, 221, 222, 223, 224, 225, 226, 227, 228, 229, 230, 231, 232, 233, 234, 235, 236, 237, 238, 239, 240, 241, 242, 243, 244, 245, 246, 247, 248, 249, 250, 251, 252, 253, 254, 255, 256, 257, 258, 259, 260, 261, 262, 263, 264, 265, 266, 267, 268, 269, 270, 271, 272, 273, 274, 275, 276, 277, 278, 279, 280, 281, 282, 283, 284, 285, 286, 287, 288, 289, 290, 291, 292, 293, 294, 295, 296, 297, 298, 299, 300, 301, 302, 303, 304, 305, 306, 307, 308, 309, 310, 311, 312, 313, 314, 315, 316, 317, 318, 319, 320, 321, 322, 323, 324, 325, 326, 327, 328, 329, 330, 331, 332, 333, 334, 335, 336, 337, 338, 339, 340, 341, 342, 343, 344, 345, 346, 347, 348, 349, 350, 351, 352, 353, 354, 355, 356, 357, 358, 359, 360, 361, 362, 363, 364, 365, 366, 367, 368, 369, 370, 371, 372, 373, 374, 375, 376, 377, 378, 379, 380, 381, 382, 383, 384, 385, 386, 387, 388, 389, 390, 391, 392, and/or 393 or active fragments or variants thereof, can be used to produce transgenic organisms, such as plants and microorganisms. The pesticidal proteins are biologically active (for example, are pesticidal) against pests including insects, fungi, nematodes, and the like. In specific embodiments, the pesticidal polypeptides and the active variant and fragments thereof have an improved pesticidal activity when compared to other polypeptides in the art. Polynucleotides encoding the pesticidal polypeptides, including for example, SEQ ID NOS: 1, 2, 3, 4, 5, 6, 7, 8, 9, 10, 11, 12, 13, 14, 15, 16, 17, 18, 19, 20, 21, 22, 23, 24, 25, 26, 27, 28, 29, 30, 31, 32, 33, 34, 35, 36, 37, 38, 39, 40, 41, 42, 43, 44, 45, 46, 47, 48, 49, 50, 51, 52, 53, 54, 55, 56, 57, 58, 59, 60, 61, 62, 63, 64, 65, 66, 67, 68, 69, 70, 71, 72, 73, 74, 75, 76, 77, 78, 79, 80, 81, 82, 83, 84, 85, 86, 87, 88, 89, 90, 91, 92, 93, 94, 95, 96, 97, 98, 99, 100, 101, 102, 103, 104, 105, 106, 107, 108, 109, 110, 111, 112, 113, 114, 115, 116, 117, 118, 119, 120, 121, 122, 123, 124, 125, 126, 127, 128, 129, 130, 131, 132, 133, 134, 135, 136, 137, 138, 139, 140, 141, 142, 143, 144, 145, 146, 147, 148, 149, 150, 151, 152, 153, 154, 155, 156, 157, 158, 159, 160, 161, 162, 163, 164, 165, 166, 167, 168, 169, 170, 171, 172, 173, 174, 175, 176, 177, 178, 179, 180, 181, 182, 183, 184, 185, 186, 187, 188, 189, 190, 191, 192, 193, 194, 195, 196, 197, 198, 199, 200, 201, 202, 203, 204, 205, 206, 207, 208, 209, 210, 211, 212, 213, 214, 215, 216, 217, 218, 219, 220, 221, 222, 223, 224, 225, 226, 227, 228, 229, 230, 231, 232, 233, 234, 235, 236, 237, 238, 239, 240, 241, 242, 243, 244, 245, 246, 247, 248, 249, 250, 251, 252, 253, 254, 255, 256, 257, 258, 259, 260, 261, 262, 263, 264, 265, 266, 267, 268, 269, 270, 271, 272, 273, 274, 275, 276, 277, 278, 279, 280, 281, 282, 283, 284, 285, 286, 287, 288, 289, 290, 291, 292, 293, 294, 295, 296, 297, 298, 299, 300, 301, 302, 303, 304, 305, 306, 307, 308, 309, 310, 311, 312, 313, 314, 315, 316, 317, 318, 319, 320, 321, 322, 323, 324, 325, 326, 327, 328, 329, 330, 331, 332, 333, 334, 335, 336, 337, 338, 339, 340, 341, 342, 343, 344, 345, 346, 347, 348, 349, 350, 351, 352, 353, 354, 355, 356, 357, 358, 359, 360, 361, 362, 363, 364, 365, 366, 367, 368, 369, 370, 371, 372, 373, 374, 375, 376, 377, 378, 379, 380, 381, 382, 383, 384, 385, 386, 387, 388, 389, 390, 391, 392, and/or 393 or active fragments or variants thereof, can be used to produce transgenic organisms, such as plants and microorganisms. The transformed organisms are characterized by genomes that comprise at least one stably incorporated DNA construct comprising a coding sequence for a pesticidal protein disclosed herein. In some embodiments, the coding sequence is operably linked to a promoter that drives expression of the encoded pesticidal polypeptide. Accordingly, transformed microorganisms, plant cells, plant tissues, plants, seeds, and plant parts are provided. A summary of various polypeptides, active variants and fragments thereof, and polynucleotides encoding the same are set forth below in Table 1. As noted in Table 1, various forms of polypeptides are provided. Full length pesticidal polypeptides, as well as, modified versions of the original full-length sequence (i.e., variants) are provided. Table 1 further denotes “CryBP1” sequences. Such sequences (SEQ ID NOS: 8, 100, and 289) comprise accessory polypeptides that can be associated with some of the toxin genes. In such instances, the CryBP1 sequences can be used alone or in combination with any of the pesticidal polypeptides provided herein. Such sequence comprise the sequence of a downstream protein that has homology to the C-terminal end of the Cry class of toxin genes and are usually found after a Cry gene that is not full-length and is missing the expected C-terminal region.

TABLE 1
Summary of SEQ ID NOs, Gene Class, and Variants thereof

| | | | | Split- | | | | |
|---|---|---|---|---|---|---|---|---|
| | | | | Cry C- | | | | |
| | | | | termi- | | | | |
| | Seq | Modified | CryBP1 | nus | Gene | | | |
| APG ID | ID | Seq ID(s) | Seq ID | Seq ID | Class | Identity | % Similarity | Homologs |
| APG00709.0 | 1 | 2 | | | Bin | 91, 92, 93, 94, 95, 96, 97, 98, | 97, 98, 99, 100 | APG00132.0 |
| | | | | | | 99, 100 | | US_2016_0311864_A1-31 |
| | | | | | | | | (90.62% identity, 96.3% |
| | | | | | | | | similarity) |
| | | | | | | | | APG00249.0 |
| | | | | | | | | US_2016_0311864_A1-96 |
| | | | | | | | | (90.12% identity, 93.73% |
| | | | | | | | | similarity) |
| | | | | | | | | APG00459.0 |
| | | | | | | | | US_2016_0311864_A1-181 |
| | | | | | | | | (88.97% identity, 92.16% |
| | | | | | | | | similarity) |
| | | | | | | | | APG00407.0 |
| | | | | | | | | US_2016_0311864_A1-170 |
| | | | | | | | | (74.94% identity, 84.28% |
| | | | | | | | | similarity) |
| | | | | | | | | APG00065.0 |
| | | | | | | | | US_2016_0177333_A1-31 |
| | | | | | | | | (73.81% identity, 80.48% |
| | | | | | | | | similarity) |
| | | | | | | | | APG01363.0 (73.15% |
| | | | | | | | | identity, 81.77% similarity) |
| | | | | | | | | WP_000839920.1 (72.2% |
| | | | | | | | | identity, 81.71% similarity) |
| | | | | | | | | APG00392.0 |
| | | | | | | | | US_2016_0311864_A1-161 |
| | | | | | | | | (72.17% identity, 82.76% |
| | | | | | | | | similarity) |
| | | | | | | | | APG00724.0 (72.06% |
| | | | | | | | | identity, 82.35% similarity) |
| | | | | | | | | APG09977.0 (71.99% |
| | | | | | | | | identity, 79.61% similarity) |
| APG00858.0 | 3 | 4 | | | MTX | 97, 98, 99, 100 | 98, 99, 100 | APG00339.0 |
| | | | | | | | | US_2016_0355842_A1-65 |
| | | | | | | | | (96.31% identity, 97.85% |
| | | | | | | | | similarity) |
| | | | | | | | | US_8318900_B2-75 (66.47% |
| | | | | | | | | identity, 76.97% similarity) |
| | | | | | | | | APG04781.0 (64.76% identity, |
| | | | | | | | | 74.21% similarity) |
| | | | | | | | | APG03543.0 (62.17% identity, |
| | | | | | | | | 73.9% similarity) |
| | | | | | | | | APG00505.0 |
| | | | | | | | | US_2016_0366881_A1-101 |
| | | | | | | | | (61.63% identity, 72.97% |
| | | | | | | | | similarity) |
| | | | | | | | | OUB07573.1 (61.63% |
| | | | | | | | | identity, 72.97% similarity) |
| | | | | | | | | US_8318900_B2-76 (61.11% |
| | | | | | | | | identity, 71.64% similarity) |
| | | | | | | | | APG08693.0 (39.77% |
| | | | | | | | | identity, 54.47% similarity) |
| | | | | | | | | OUB07579.1 (39.77% |
| | | | | | | | | identity, 54.47% similarity) |
| | | | | | | | | OUB27300.1 (37.5% identity, |
| | | | | | | | | 50.6% similarity) |
| APG00871.0 | 5 | | | | MTX | 60, 65, 70, 75, 80, 85, 90, 91, | 75, 80, 85, 90, 91, | WP_002193629.1 (62.38% |
| | | | | | | 92, 93, 94, 95, 96, 97, 98, | 92, 93, 94, 95, | identity, 75.88% similarity) |
| | | | | | | 99, 100 | 96, 97, 98, 99, | APG01051.0 (61.86% identity, |
| | | | | | | | 100 | 75.0% similarity) |
| | | | | | | | | APG00755.0 |
| | | | | | | | | US_2016_0355842_A1-166 |
| | | | | | | | | (56.19% identity, 69.84% |
| | | | | | | | | similarity) |
| | | | | | | | | APG02980.0 (55.65% identity, |
| | | | | | | | | 67.26% similarity) |
| | | | | | | | | APG00402.0 |
| | | | | | | | | US_2016_0355842_A1-77 |
| | | | | | | | | (53.29% identity, 74.01% |
| | | | | | | | | similarity) |
| | | | | | | | | APG00583.0 |
| | | | | | | | | US_2016_0366881_A1-114 |
| | | | | | | | | (43.2% identity, 58.28% |
| | | | | | | | | similarity) |
| | | | | | | | | WP_042595209.1 (27.1% |
| | | | | | | | | identity, 47.35% similarity) |
| | | | | | | | | US_2003_0049243_A1-38 |
| | | | | | | | | (26.79% identity, 47.04% |
| | | | | | | | | similarity) |
| APG00932.0 | 6 | 7 | 8 | | MTX | 80, 85, 90, 91, 92, 93, 94, 95, | 90, 91, 92, 93, 94, | APG08029.0 (75.9% identity, |
| | | | | | | 96, 97, 98, 99, 100 | 95, 96, 97, 98, | 85.9% similarity) |
| | | | | | | | 99, 100 | APG03217.0 (75.9% identity, |
| | | | | | | | | 85.64% similarity) |
| | | | | | | | | APG01797.0 (74.62% |
| | | | | | | | | identity, 84.87% similarity) |
| | | | | | | | | APG04119.0 (62.4% identity, |
| | | | | | | | | 78.26% similarity) |
| | | | | | | | | ANN35812.1 (27.25% |
| | | | | | | | | identity, 40.77% similarity) |
| APG00937.0 | 9 | 10 | | | Cry | 70, 75, 80, 85, 90, 91, 92, 93, | 80, 85, 90, 91, 92, | US_8461421_B2-120 (69.74% |
| | | | | | | 94, 95, 96, 97, 98, 99, 100 | 93, 94, 95, 96, | identity, 79.12% similarity) |
| | | | | | | | 97, 98, 99, 100 | AIW52619.1 (50.75% identity, |
| | | | | | | | | 64.72% similarity) |
| | | | | | | | | APG00864.0 (50.33% |
| | | | | | | | | identity, 60.64% similarity) |
| | | | | | | | | US_9567381_B2-424 (50.14% |
| | | | | | | | | identity, 64.19% similarity) |
| | | | | | | | | US_8318900_B2-83 (48.53% |
| | | | | | | | | identity, 58.56% similarity) |
| | | | | | | | | WP_000286447.1 (48.37% |
| | | | | | | | | identity, 60.47% similarity) |
| | | | | | | | | ADD71694.1 (47.86% |
| | | | | | | | | identity, 57.89% similarity) |
| | | | | | | | | APG00664.0 (47.7% identity, |
| | | | | | | | | 60.81% similarity) |
| | | | | | | | | WP_080990974.1 (46.68% |
| | | | | | | | | identity, 60.11% similarity) |
| | | | | | | | | US_9567381_B2-423 (45.27% |
| | | | | | | | | identity, 56.06% similarity) |
| APG00991.0 | 11 | 12 | | | MTX | 99, 100 | 99, 100 | APG00055.0 |
| | | | | | | | | US_2016_0304898_A1-86 |
| | | | | | | | | (98.38% identity, 98.38% |
| | | | | | | | | similarity) |
| | | | | | | | | US_8796026_B2-6 (80.27% |
| | | | | | | | | identity, 86.76% similarity) |
| | | | | | | | | WP_061885068.1 (80.0% |
| | | | | | | | | identity, 86.76% similarity) |
| | | | | | | | | WP_000875423.1 (78.92% |
| | | | | | | | | identity, 86.49% similarity) |
| | | | | | | | | US_8796026_B2-4 (78.11% |
| | | | | | | | | identity, 87.84% similarity) |
| | | | | | | | | US_8796026_B2-14 (77.84% |
| | | | | | | | | identity, 87.57% similarity) |
| | | | | | | | | US_8796026_B2-8 (77.63% |
| | | | | | | | | identity, 86.25% similarity) |
| | | | | | | | | AGF90967.1 (77.57% identity, |
| | | | | | | | | 86.49% similarity) |
| | | | | | | | | US_8796026_B2-10 (75.14% |
| | | | | | | | | identity, 86.22% similarity) |
| | | | | | | | | CA_2844913-58 (74.54% |
| | | | | | | | | identity, 83.46% similarity) |
| APG01051.0 | 13 | | | | MTX | 60, 65, 70, 75, 80, 85, 90, 91, | 80, 85, 90, 91, 92, | WP_002193629.1 (95.62% |
| | | | | | | 92, 93, 94, 95, 96, 97, 98, | 93, 94, 95, 96, | identity, 97.64% similarity) |
| | | | | | | 99, 100 | 97, 98, 99, 100 | APG00871.0 (61.86% identity, |
| | | | | | | | | 75.0% similarity) |
| | | | | | | | | APG00755.0 |
| | | | | | | | | US_2016_0355842_A1-166 |
| | | | | | | | | (59.49% identity, 70.1% |
| | | | | | | | | similarity) |
| | | | | | | | | APG02980.0 (55.59% identity, |
| | | | | | | | | 65.59% similarity) |
| | | | | | | | | APG00402.0 |
| | | | | | | | | US_2016_0355842_A1-77 |
| | | | | | | | | (53.36% identity, 75.17% |
| | | | | | | | | similarity) |
| | | | | | | | | APG00583.0 |
| | | | | | | | | US_2016_0366881_A1-114 |
| | | | | | | | | (45.26% identity, 59.33% |
| | | | | | | | | similarity) |
| | | | | | | | | WP_042595209.1 (25.4% |
| | | | | | | | | identity, 47.91% similarity) |
| | | | | | | | | US_2003_0049243_A1-38 |
| | | | | | | | | (25.08% identity, 47.59% |
| | | | | | | | | similarity) |
| APG01052.0 | 14 | 15 | | | Cry6 | 75, 80, 85, 90, 91, 92, 93, 94, | 85, 90, 91, 92, 93, | WP_020799009.1 (95.57% |
| | | | | | | 95, 96, 97, 98, 99, 100 | 94, 95, 96, 97, | identity, 95.57% similarity) |
| | | | | | | | 98, 99, 100 | APG00258.0 |
| | | | | | | | | US_2016_0311864_A1-99 |
| | | | | | | | | (70.98% identity, 82.64% |
| | | | | | | | | similarity) |
| | | | | | | | | APG00279.0 |
| | | | | | | | | US_2016_0311864_A1-114 |
| | | | | | | | | (34.47% identity, 51.14% |
| | | | | | | | | similarity) |
| | | | | | | | | WP_078012852.1 (32.03% |
| | | | | | | | | identity, 47.68% similarity) |
| | | | | | | | | US_8461421_B2-11 (30.56% |
| | | | | | | | | identity, 50.0% similarity) |
| | | | | | | | | WP_078205543.1 (30.56% |
| | | | | | | | | identity, 50.0% similarity) |
| | | | | | | | | WP_025739024.1 (30.41% |
| | | | | | | | | identity, 46.72% similarity) |
| | | | | | | | | WP_062970006.1 (30.37% |
| | | | | | | | | identity, 46.96% similarity) |
| | | | | | | | | APG00024.0 |
| | | | | | | | | US_2016_0304898_A1-39 |
| | | | | | | | | (30.3% identity, 50.25% |
| | | | | | | | | similarity) |
| | | | | | | | | US_8461421_B2-71 (30.3% |
| | | | | | | | | identity, 50.0% similarity) |
| | | | | | | | | APG00631.0 |
| | | | | | | | | US_2016_0366881_A1-127 |
| | | | | | | | | (30.3% identity, 49.24% |
| | | | | | | | | similarity) |
| APG01059.0 | 16 | 17 | | | Bin | 96, 97, 98, 99, 100 | 98, 99, 100 | APG00844.0 |
| | | | | | | | | US_2016_0311864_A1-221 |
| | | | | | | | | (95.55% identity, 97.12% |
| | | | | | | | | similarity) |
| | | | | | | | | APG00353.0 |
| | | | | | | | | US_2016_0311864_A1-144 |
| | | | | | | | | (93.99% identity, 96.08% |
| | | | | | | | | similarity) |
| | | | | | | | | APG00301.0 |
| | | | | | | | | US_2016_0311864_A1-131 |
| | | | | | | | | (93.47% identity, 96.61% |
| | | | | | | | | similarity) |
| | | | | | | | | APG00203.0 |
| | | | | | | | | US_2016_0311864_A1-69 |
| | | | | | | | | (91.91% identity, 94.52% |
| | | | | | | | | similarity) |
| | | | | | | | | APG00419.0 |
| | | | | | | | | US_2016_0311864_A1-176 |
| | | | | | | | | (90.43% identity, 92.19% |
| | | | | | | | | similarity) |
| | | | | | | | | APG00412.0 |
| | | | | | | | | US_2016_0311864_A1-173 |
| | | | | | | | | (89.51% identity, 92.84% |
| | | | | | | | | similarity) |
| | | | | | | | | APG07334.0 (88.58% |
| | | | | | | | | identity, 90.36% similarity) |
| | | | | | | | | APG00229.0 |
| | | | | | | | | US_2016_0311864_A1-84 |
| | | | | | | | | (88.12% identity, 90.1% |
| | | | | | | | | similarity) |
| | | | | | | | | APG09977.0 (86.68% |
| | | | | | | | | identity, 93.73% similarity) |
| | | | | | | | | APG01363.0 (84.3% identity, |
| | | | | | | | | 87.85% similarity) |
| APG01093.0 | 18 | | | | MTX | 75, 80, 85, 90, 91, 92, 93, 94, | 85, 90, 91, 92, 93, | APG07780.0 (74.1% identity, |
| | | | | | | 95, 96, 97, 98, 99, 100 | 94, 95, 96, 97, | 84.53% similarity) |
| | | | | | | | 98, 99, 100 | APG01273.0 (64.31% |
| | | | | | | | | identity, 79.15% similarity) |
| | | | | | | | | APG08917.0 (57.76% identity, |
| | | | | | | | | 71.48% similarity) |
| | | | | | | | | APG01706.0 (54.32% identity, |
| | | | | | | | | 70.14% similarity) |
| | | | | | | | | WP_073006286.1 (33.55% |
| | | | | | | | | identity, 50.65% similarity) |
| APG01122.0 | 19 | | | | MTX | 45, 50, 55, 60, 65, 70, 75, 80, | 65, 70, 75, 80, 85, | APG04690.0 (92.16% identity, |
| | | | | | | 85, 90, 91, 92, 93, 94, 95, | 90, 91, 92, 93, | 93.73% similarity) |
| | | | | | | 96, 97, 98, 99, 100 | 94, 95, 96, 97, | APG02068.0 (46.91% identity, |
| | | | | | | | 98, 99, 100 | 64.2% similarity) |
| | | | | | | | | APG00360.0 |
| | | | | | | | | US_2016_0355842_A1-69 |
| | | | | | | | | (41.05% identity, 60.19% |
| | | | | | | | | similarity) |
| | | | | | | | | APG00907.0 |
| | | | | | | | | US_2016_0311864_A1-225 |
| | | | | | | | | (40.75% identity, 58.62% |
| | | | | | | | | similarity) |
| | | | | | | | | US_9328356_B2-46 (40.24% |
| | | | | | | | | identity, 58.26% similarity) |
| | | | | | | | | US_9567381_B2-441 (40.24% |
| | | | | | | | | identity, 57.66% similarity) |
| | | | | | | | | APG07396.0 (39.69% |
| | | | | | | | | identity, 57.54% similarity) |
| | | | | | | | | APG00332.0 |
| | | | | | | | | US_2016_0355842_A1-64 |
| | | | | | | | | (38.87% identity, 57.68% |
| | | | | | | | | similarity) |
| | | | | | | | | APG01885.0 (38.87% identity, |
| | | | | | | | | 56.43% similarity) |
| | | | | | | | | APG05358.0 (38.41% identity, |
| | | | | | | | | 57.93% similarity) |
| APG01135.0 | 20 | | | | Cry | 70, 75, 80, 85, 90, 91, 92, 93, | 85, 90, 91, 92, 93, | CCW05160.1 (94.57% |
| | | | | | | 94, 95, 96, 97, 98, 99, 100 | 94, 95, 96, 97, | identity, 96.43% similarity) |
| | | | | | | | 98, 99, 100 | WP_081631318.1 (93.85% |
| | | | | | | | | identity, 95.69% similarity) |
| | | | | | | | | APG00042.0 |
| | | | | | | | | US_2016_0304898_A1-67 |
| | | | | | | | | (66.92% identity, 80.92% |
| | | | | | | | | similarity) |
| | | | | | | | | APG00122.0 |
| | | | | | | | | US_2016_0304898_A1-143 |
| | | | | | | | | (31.86% identity, 49.22% |
| | | | | | | | | similarity) |
| | | | | | | | | WP_006922195.1 (31.72% |
| | | | | | | | | identity, 48.08% similarity) |
| | | | | | | | | APG07751.0 (30.91% identity, |
| | | | | | | | | 46.99% similarity) |
| | | | | | | | | APG04689.0 (30.78% identity, |
| | | | | | | | | 45.96% similarity) |
| | | | | | | | | WP_006919322.1 (30.78% |
| | | | | | | | | identity, 45.96% similarity) |
| | | | | | | | | APG00086.0 |
| | | | | | | | | US_2016_0304898_A1-113 |
| | | | | | | | | (30.35% identity, 45.26% |
| | | | | | | | | similarity) |
| | | | | | | | | US_8461421_B2-184 (30.15% |
| | | | | | | | | identity, 43.93% similarity) |
| APG01153.0 | 21 | | | | Bin | 75, 80, 85, 90, 91, 92, 93, 94, | 85, 90, 91, 92, 93, | APG00700.0 |
| | | | | | | 95, 96, 97, 98, 99, 100 | 94, 95, 96, 97, | US_2016_0311864_A1-207 |
| | | | | | | | 98, 99, 100 | (74.29% identity, 84.42% |
| | | | | | | | | similarity) |
| | | | | | | | | APG00095.0 |
| | | | | | | | | US_2016_0177333_A1-52 |
| | | | | | | | | (74.29% identity, 84.16% |
| | | | | | | | | similarity) |
| | | | | | | | | APG00750.0 |
| | | | | | | | | US_2016_0366881_A1-132 |
| | | | | | | | | (31.18% identity, 46.67% |
| | | | | | | | | similarity) |
| | | | | | | | | APG00629.0 |
| | | | | | | | | US_2016_0366881_A1-126 |
| | | | | | | | | (30.35% identity, 45.18% |
| | | | | | | | | similarity) |
| | | | | | | | | APG00474.0 |
| | | | | | | | | US_2016_0366881_A1-89 |
| | | | | | | | | (30.1% identity, 45.02% |
| | | | | | | | | similarity) |
| | | | | | | | | APG00050.0 |
| | | | | | | | | US_2016_0304898_A1-80 |
| | | | | | | | | (30.02% identity, 47.04% |
| | | | | | | | | similarity) |
| | | | | | | | | APG00557.0 (30.0% identity, |
| | | | | | | | | 45.45% similarity) |
| | | | | | | | | APG08101.0 (29.96% identity, |
| | | | | | | | | 43.25% similarity) |
| | | | | | | | | US_9567381_B2-398 (28.6% |
| | | | | | | | | identity, 42.8% similarity) |
| | | | | | | | | US_9567381_B2-394 (28.51% |
| | | | | | | | | identity, 42.34% similarity) |
| APG01197.0 | 22 | 23 | | | MTX | 60, 65, 70, 75, 80, 85, 90, 91, | 60, 65, 70, 75, 80, | WP_078187232.1 (72.56% |
| | | | | | | 92, 93, 94, 95, 96, 97, 98, | 85, 90, 91, 92, | identity, 74.19% similarity) |
| | | | | | | 99, 100 | 93, 94, 95, 96, | APG03848.0 (56.66% |
| | | | | | | | 97, 98, 99, 100 | identity, 59.84% similarity) |
| | | | | | | | | WP_075718639.1 (51.36% |
| | | | | | | | | identity, 55.23% similarity) |
| | | | | | | | | WP_075716873.1 (51.16% |
| | | | | | | | | identity, 55.23% similarity) |
| | | | | | | | | APG03638.0 (46.14% identity, |
| | | | | | | | | 50.97% similarity) |
| | | | | | | | | OOR71217.1 (46.14% |
| | | | | | | | | identity, 50.97% similarity) |
| | | | | | | | | APG08605.0 (45.95% identity, |
| | | | | | | | | 50.97% similarity) |
| | | | | | | | | WP_078187960.1 (42.73% |
| | | | | | | | | identity, 48.1% similarity) |
| | | | | | | | | OOR72669.1 (31.1% identity, |
| | | | | | | | | 31.3% similarity) |
| | | | | | | | | CA_2844913-116 (27.03% |
| | | | | | | | | identity, 32.72% similarity) |
| APG01261.0 | 24 | 25 | | | Cry | 30, 35, 40, 45, 50, 55, 60, 65, | 45, 50, 55, 60, 65, | WP_006925513.1 (100.0% |
| | | | | | | 70, 75, 80, 85, 90, 91, 92, | 70, 75, 80, 85, | identity, 100.0% similarity) |
| | | | | | | 93, 94, 95, 96, 97, 98, 99, 100 | 90, 91, 92, 93, | APG05056.0 (34.77% identity, |
| | | | | | | | 94, 95, 96, 97, 98, | 51.28% similarity) |
| | | | | | | | 99, 100 | WP_006927245.1 (29.38% |
| | | | | | | | | identity, 42.48% similarity) |
| | | | | | | | | WP_006922195.1 (29.1% |
| | | | | | | | | identity, 42.73% similarity) |
| | | | | | | | | APG00086.0 |
| | | | | | | | | US_2016_0304898_A1-113 |
| | | | | | | | | (28.88% identity, 42.36% |
| | | | | | | | | similarity) |
| | | | | | | | | APG07751.0 (28.7% identity, |
| | | | | | | | | 42.14% similarity) |
| | | | | | | | | APG00057.0 |
| | | | | | | | | US_2016_0304898_A1-88 |
| | | | | | | | | (28.54% identity, 42.0% |
| | | | | | | | | similarity) |
| | | | | | | | | APG00122.0 |
| | | | | | | | | US_2016_0304898_A1-143 |
| | | | | | | | | (28.19% identity, 43.62% |
| | | | | | | | | similarity) |
| | | | | | | | | APG04689.0 (26.98% identity, |
| | | | | | | | | 40.31% similarity) |
| | | | | | | | | WP_006919322.1 (26.98% |
| | | | | | | | | identity, 40.31% similarity) |
| APG01313.0 | 26 | 27, 28 | | | Cry | 75, 80, 85, 90, 91, 92, 93, 94, | 90, 91, 92, 93, 94, | APG00030.0 |
| | | | | | | 95, 96, 97, 98, 99, 100 | 95, 96, 97, 98, | US_2016_0304898_A1-50 |
| | | | | | | | 99, 100 | (74.97% identity, 87.18% |
| | | | | | | | | similarity) |
| | | | | | | | | APG00096.0 |
| | | | | | | | | US_2016_0304898_A1-125 |
| | | | | | | | | (74.9% identity, 86.47% |
| | | | | | | | | similarity) |
| | | | | | | | | US_8461415_B2-14 (74.05% |
| | | | | | | | | identity, 86.2% similarity) |
| | | | | | | | | US_8461415_B2-42 (74.05% |
| | | | | | | | | identity, 86.2% similarity) |
| | | | | | | | | APG00113.0 |
| | | | | | | | | US_2016_0311864_A1-24 |
| | | | | | | | | (73.42% identity, 84.8% |
| | | | | | | | | similarity) |
| | | | | | | | | APG05424.0 (69.11% identity, |
| | | | | | | | | 80.68% similarity) |
| | | | | | | | | APG00196.0 |
| | | | | | | | | US_2016_0311864_A1-66 |
| | | | | | | | | (68.25% identity, 82.06% |
| | | | | | | | | similarity) |
| | | | | | | | | WP_081097654.1 (66.46% |
| | | | | | | | | identity, 81.47% similarity) |
| | | | | | | | | APG00452.0 |
| | | | | | | | | US_2016_0366881_A1-73 |
| | | | | | | | | (65.11% identity, 79.82% |
| | | | | | | | | similarity) |
| | | | | | | | | APG00114.0 |
| | | | | | | | | US_2016_0177333_A1-64 |
| | | | | | | | | (63.43% identity, 79.75% |
| | | | | | | | | similarity) |
| APG01367.0 | 29 | 30 | | | MTX | 50, 55, 60, 65, 70, 75, 80, 85, | 65, 70, 75, 80, 85, | APG02970.0 (87.05% identity, |
| | | | | | | 90, 91, 92, 93, 94, 95, 96, | 90, 91, 92, 93, | 92.17% similarity) |
| | | | | | | 97, 98, 99, 100 | 94, 95, 96, 97, | APG02808.0 (86.49% identity, |
| | | | | | | | 98, 99, 100 | 92.19% similarity) |
| | | | | | | | | APG05040.0 (82.53% identity, |
| | | | | | | | | 90.66% similarity) |
| | | | | | | | | APG00793.0 |
| | | | | | | | | US_2016_0355842_A1-170 |
| | | | | | | | | (47.13% identity, 64.37% |
| | | | | | | | | similarity) |
| | | | | | | | | APG09460.0 (41.86% |
| | | | | | | | | identity, 60.47% similarity) |
| | | | | | | | | APG00416.0 |
| | | | | | | | | US_2016_0355842_A1-82 |
| | | | | | | | | (41.45% identity, 60.29% |
| | | | | | | | | similarity) |
| | | | | | | | | APG05956.0 (40.7% identity, |
| | | | | | | | | 59.59% similarity) |
| | | | | | | | | US_8829279_B2-11 (40.44% |
| | | | | | | | | identity, 57.1% similarity) |
| | | | | | | | | WP_072335847.1 (40.34% |
| | | | | | | | | identity, 57.14% similarity) |
| | | | | | | | | APG07606.0 (37.34% |
| | | | | | | | | identity, 53.79% similarity) |
| APG01393.0 | 31 | 32 | | | Cyt | 55, 60, 65, 70, 75, 80, 85, 90, | 55, 60, 65, 70, 75, | APG02647.0 (52.67% |
| | | | | | | 91, 92, 93, 94, 95, 96, 97, | 80, 85, 90, 91, | identity, 54.8% similarity) |
| | | | | | | 98, 99, 100 | 92, 93, 94, 95, | WP_011898730.1 (43.56% |
| | | | | | | | 96, 97, 98, 99, 100 | identity, 46.21% similarity) |
| | | | | | | | | APG00462.0 |
| | | | | | | | | US_2016_0311864_A1-183 |
| | | | | | | | | (42.7% identity, 45.55% |
| | | | | | | | | similarity) |
| | | | | | | | | WP_005311350.1 (40.93% |
| | | | | | | | | identity, 43.42% similarity) |
| | | | | | | | | WP_017413134.1 (40.93% |
| | | | | | | | | identity, 43.42% similarity) |
| | | | | | | | | WP_073536971.1 (40.93% |
| | | | | | | | | identity, 43.42% similarity) |
| | | | | | | | | WP_042469140.1 (40.64% |
| | | | | | | | | identity, 43.11% similarity) |
| | | | | | | | | WP_043151353.1 (40.64% |
| | | | | | | | | identity, 43.11% similarity) |
| | | | | | | | | WP_058393986.1 (40.57% |
| | | | | | | | | identity, 43.06% similarity) |
| | | | | | | | | WP_058407268.1 (40.28% |
| | | | | | | | | identity, 42.76% similarity) |
| APG01443.0 | 33 | 34 | | | MTX | 90, 91, 92, 93, 94, 95, 96, 97, | 93, 94, 95, 96, 97, | APG04431.0 (86.29% |
| | | | | | | 98, 99, 100 | 98, 99, 100 | identity, 91.37% similarity) |
| | | | | | | | | CA_2844913-120 (85.49% |
| | | | | | | | | identity, 92.49% similarity) |
| | | | | | | | | APG00202.0 |
| | | | | | | | | US_2016_0304898_A1-195 |
| | | | | | | | | (84.05% identity, 90.89% |
| | | | | | | | | similarity) |
| | | | | | | | | APG00208.0 |
| | | | | | | | | US_2016_0304898_A1-201 |
| | | | | | | | | (80.3% identity, 89.14% |
| | | | | | | | | similarity) |
| | | | | | | | | APG00352.0 |
| | | | | | | | | US_2016_0366881_A1-29 |
| | | | | | | | | (75.52% identity, 86.34% |
| | | | | | | | | similarity) |
| | | | | | | | | WP_000715637.1 (74.94% |
| | | | | | | | | identity, 83.46% similarity) |
| | | | | | | | | CA_2844913-122 (33.67% |
| | | | | | | | | identity, 49.38% similarity) |
| APG01446.0 | 35 | 36, 37, 38, | | | Cry | 94, 95, 96, 97, 98, 99, 100 | 96, 97, 98, 99, 100 | ETT82181.1 (93.36% identity, |
| | | 39 | | | | | | 95.65% similarity) |
| | | | | | | | | US_9567381_B2-455 (93.0% |
| | | | | | | | | identity, 95.65% similarity) |
| | | | | | | | | WP_016093954.1 (93.0% |
| | | | | | | | | identity, 95.29% similarity) |
| | | | | | | | | WP_033729515.1 (93.0% |
| | | | | | | | | identity, 95.29% similarity) |
| | | | | | | | | AGU12794.1 (92.75% |
| | | | | | | | | identity, 95.17% similarity) |
| | | | | | | | | WP_002147758.1 (92.63% |
| | | | | | | | | identity, 95.29% similarity) |
| | | | | | | | | WP_016095385.1 (91.86% |
| | | | | | | | | identity, 94.49% similarity) |
| | | | | | | | | APG00705.0 (91.68% |
| | | | | | | | | identity, 94.81% similarity) |
| | | | | | | | | APG00526.0 |
| | | | | | | | | US_2016_0304898_A1-214 |
| | | | | | | | | (87.8% identity, 92.87% |
| | | | | | | | | similarity) |
| | | | | | | | | APG00025.0 |
| | | | | | | | | US_2016_0304898_A1-41 |
| | | | | | | | | (86.11% identity, 91.91% |
| | | | | | | | | similarity) |
| APG01679.0 | 40 | 41 | | | Cry | 65, 70, 75, 80, 85, 90, 91, 92, | 75, 80, 85, 90, 91, | WP_048536362.1 (100.0% |
| | | | | | | 93, 94, 95, 96, 97, 98, 99, | 92, 93, 94, 95, | identity, 100.0% similarity) |
| | | | | | | 100 | 96, 97, 98, 99, | APG00702.0 (62.74% |
| | | | | | | | 100 | identity, 70.16% similarity) |
| | | | | | | | | APG00401.0 |
| | | | | | | | | US_2016_0311864_A1-168 |
| | | | | | | | | (43.04% identity, 55.87% |
| | | | | | | | | similarity) |
| | | | | | | | | APG00255.0 |
| | | | | | | | | US_2016_0311864_A1-98 |
| | | | | | | | | (42.92% identity, 55.97% |
| | | | | | | | | similarity) |
| | | | | | | | | APG00285.0 |
| | | | | | | | | US_2016_0311864_A1-118 |
| | | | | | | | | (42.65% identity, 58.31% |
| | | | | | | | | similarity) |
| | | | | | | | | APG00435.0 |
| | | | | | | | | US_2016_0366881_A1-59 |
| | | | | | | | | (42.1% identity, 59.52% |
| | | | | | | | | similarity) |
| | | | | | | | | OTX35223.1 (42.1% identity, |
| | | | | | | | | 59.52% similarity) |
| | | | | | | | | APG00363.0 |
| | | | | | | | | US_2016_0366881_A1-34 |
| | | | | | | | | (41.95% identity, 58.69% |
| | | | | | | | | similarity) |
| | | | | | | | | KXH80331.1 (41.03% identity, |
| | | | | | | | | 56.23% similarity) |
| | | | | | | | | APG00219.0 |
| | | | | | | | | US_2016_0311864_A1-80 |
| | | | | | | | | (40.76% identity, 56.37% |
| | | | | | | | | similarity) |
| APG01706.0 | 42 | | | | MTX | 60, 65, 70, 75, 80, 85, 90, 91, | 70, 75, 80, 85, 90, | APG08917.0 (63.54% identity, |
| | | | | | | 92, 93, 94, 95, 96, 97, 98, | 91, 92, 93, 94, | 75.81% similarity) |
| | | | | | | 99, 100 | 95, 96, 97, 98, | APG07780.0 (56.63% |
| | | | | | | | 99, 100 | identity, 67.74% similarity) |
| | | | | | | | | APG01093.0 (54.32% identity, |
| | | | | | | | | 70.14% similarity) |
| | | | | | | | | APG01273.0 (52.84% |
| | | | | | | | | identity, 66.67% similarity) |
| | | | | | | | | WP_073006286.1 (32.59% |
| | | | | | | | | identity, 47.6% similarity) |
| APG01778.0 | 43 | 44 | | | Bin | 5, 10, 15, 20, 25, 30, 35, 40, | 5, 10, 15, 20, 25, | SMF85563.1 (42.4% identity, |
| | | | | | | 45, 50, 55, 60, 65, 70, 75, 80, | 30, 35, 40, 45, | 48.85% similarity) |
| | | | | | | 85, 90, 91, 92, 93, 94, 95, | 50, 55, 60, 65, 70, | WP_078499120.1 (39.63% |
| | | | | | | 96, 97, 98, 99, 100 | 75, 80, 85, 90, | identity, 47.47% similarity) |
| | | | | | | | 91, 92, 93, 94, | SEO87450.1 (38.84% identity, |
| | | | | | | | 95, 96, 97, 98, 99, | 46.43% similarity) |
| | | | | | | | 100 | SDO50539.1 (38.71% identity, |
| | | | | | | | | 46.08% similarity) |
| | | | | | | | | WP_076238289.1 (36.45% |
| | | | | | | | | identity, 46.26% similarity) |
| | | | | | | | | WP_041052138.1 (34.43% |
| | | | | | | | | identity, 44.81% similarity) |
| | | | | | | | | WP_066197842.1 (33.64% |
| | | | | | | | | identity, 44.55% similarity) |
| APG01785.0 | 45 | 46 | | | MTX | 65, 70, 75, 80, 85, 90, 91, 92, | 75, 80, 85, 90, 91, | APG00427.0 |
| | | | | | | 93, 94, 95, 96, 97, 98, 99, | 92, 93, 94, 95, | US_2016_0311864_A1-178 |
| | | | | | | 100 | 96, 97, 98, 99, | (60.62% identity, 74.15% |
| | | | | | | | 100 | similarity) |
| | | | | | | | | APG06560.0 (59.76% |
| | | | | | | | | identity, 73.48% similarity) |
| | | | | | | | | APG00851.0 |
| | | | | | | | | US_2016_0311864_A1-222 |
| | | | | | | | | (58.95% identity, 73.15% |
| | | | | | | | | similarity) |
| | | | | | | | | OUB29113.1 (58.95% |
| | | | | | | | | identity, 73.15% similarity) |
| | | | | | | | | WP_061663532.1 (58.95% |
| | | | | | | | | identity, 73.15% similarity) |
| | | | | | | | | APG02401.0 (58.38% identity, |
| | | | | | | | | 70.96% similarity) |
| | | | | | | | | WP_018673409.1 (58.38% |
| | | | | | | | | identity, 70.96% similarity) |
| | | | | | | | | APG02701.0 (57.83% |
| | | | | | | | | identity, 71.39% similarity) |
| | | | | | | | | APG00585.0 |
| | | | | | | | | US_2016_0366881_A1-116 |
| | | | | | | | | (55.69% identity, 69.76% |
| | | | | | | | | similarity) |
| | | | | | | | | OUB22927.1 (55.05% |
| | | | | | | | | identity, 70.64% similarity) |
| APG01858.0 | 47 | 48 | | | MTX | 65, 70, 75, 80, 85, 90, 91, 92, | 75, 80, 85, 90, 91, | APG08882.0 (87.87% identity, |
| | | | | | | 93, 94, 95, 96, 97, 98, 99, | 92, 93, 94, 95, | 91.34% similarity) |
| | | | | | | 100 | 96, 97, 98, 99, | APG09211.0 (60.29% |
| | | | | | | | 100 | identity, 72.15% similarity) |
| | | | | | | | | APG09338.0 (57.82% |
| | | | | | | | | identity, 72.46% similarity) |
| | | | | | | | | APG00170.0 |
| | | | | | | | | US_2016_0355842_A1-13 |
| | | | | | | | | (57.59% identity, 69.16% |
| | | | | | | | | similarity) |
| | | | | | | | | APG00911.0 |
| | | | | | | | | US_2016_0355842_A1-189 |
| | | | | | | | | (57.11% identity, 70.56% |
| | | | | | | | | similarity) |
| | | | | | | | | APG00051.0 |
| | | | | | | | | US_2016_0304898_A1-81 |
| | | | | | | | | (57.07% identity, 70.02% |
| | | | | | | | | similarity) |
| | | | | | | | | APG00854.0 |
| | | | | | | | | US_2016_0355842_A1-179 |
| | | | | | | | | (56.74% identity, 69.72% |
| | | | | | | | | similarity) |
| | | | | | | | | US_8829279_B2-11 (56.25% |
| | | | | | | | | identity, 68.75% similarity) |
| | | | | | | | | APG00293.0 |
| | | | | | | | | US_2016_0355842_A1-51 |
| | | | | | | | | (54.89% identity, 68.17% |
| | | | | | | | | similarity) |
| | | | | | | | | APG06242.0 (54.52% |
| | | | | | | | | identity, 66.26% similarity) |
| APG01874.0 | 49 | 50, 51 | | | MTX | 85, 90, 91, 92, 93, 94, 95, 96, | 90, 91, 92, 93, 94, | WP_068985586.1 (96.03% |
| | | | | | | 97, 98, 99, 100 | 95, 96, 97, 98, | identity, 96.03% similarity) |
| | | | | | | | 99, 100 | APG00417.0 |
| | | | | | | | | US_2016_0355842_A1-83 |
| | | | | | | | | (80.06% identity, 85.67% |
| | | | | | | | | similarity) |
| | | | | | | | | WP_071745741.1 (78.93% |
| | | | | | | | | identity, 84.83% similarity) |
| | | | | | | | | SDZ44671.1 (78.37% identity, |
| | | | | | | | | 83.99% similarity) |
| | | | | | | | | APG00667.0 |
| | | | | | | | | US_2016_0355842_A1-155 |
| | | | | | | | | (57.46% identity, 68.45% |
| | | | | | | | | similarity) |
| | | | | | | | | APG00938.0 |
| | | | | | | | | US_2016_0355842_A1-190 |
| | | | | | | | | (52.99% identity, 65.76% |
| | | | | | | | | similarity) |
| | | | | | | | | APG00794.0 |
| | | | | | | | | US_2016_0355842_A1-171 |
| | | | | | | | | (52.17% identity, 62.77% |
| | | | | | | | | similarity) |
| | | | | | | | | APG09055.0 (51.76% |
| | | | | | | | | identity, 64.5% similarity) |
| | | | | | | | | APG00569.0 |
| | | | | | | | | US_2016_0355842_A1-129 |
| | | | | | | | | (51.6% identity, 63.9% |
| | | | | | | | | similarity) |
| | | | | | | | | APG06371.0 (51.49% |
| | | | | | | | | identity, 63.69% similarity) |
| | | | | | | | | APG00563.0 |
| | | | | | | | | US_2016_0355842_A1-127 |
| | | | | | | | | (51.49% identity, 63.14% |
| | | | | | | | | similarity) |
| APG01883.0 | 52 | 53 | | | Cry | 85, 90, 91, 92, 93, 94, 95, 96, | 90, 91, 92, 93, 94, | APG00555.0 (80.29% |
| | | | | | | 97, 98, 99, 100 | 95, 96, 97, 98, | identity, 87.21% similarity) |
| | | | | | | | 99, 100 | CA_2516349-20 (78.26% |
| | | | | | | | | identity, 85.65% similarity) |
| | | | | | | | | CA_2516349-22 (76.96% |
| | | | | | | | | identity, 84.06% similarity) |
| | | | | | | | | CA_2516349-24 (76.23% |
| | | | | | | | | identity, 83.04% similarity) |
| | | | | | | | | US_8692066_B2-2 (67.59% |
| | | | | | | | | identity, 76.74% similarity) |
| | | | | | | | | US_7919272_B2-5 (66.24% |
| | | | | | | | | identity, 76.44% similarity) |
| | | | | | | | | US_7919272_B2-17 (66.09% |
| | | | | | | | | identity, 76.44% similarity) |
| | | | | | | | | US_7919272_B2-33 (65.95% |
| | | | | | | | | identity, 76.01% similarity) |
| | | | | | | | | APA45008.1 (65.74% identity, |
| | | | | | | | | 74.78% similarity) |
| | | | | | | | | APG01028.0 (65.47% |
| | | | | | | | | identity, 75.36% similarity) |
| APG01885.0 | 54 | | | | MTX | 55, 60, 65, 70, 75, 80, 85, 90, | 70, 75, 80, 85, 90, | US_8318900_B2-96 (52.73% |
| | | | | | | 91, 92, 93, 94, 95, 96, 97, | 91, 92, 93, 94, | identity, 68.17% similarity) |
| | | | | | | 98, 99, 100 | 95, 96, 97, 98, | WP_044797748.1 (51.76% |
| | | | | | | | 99, 100 | identity, 68.69% similarity) |
| | | | | | | | | APG03053.0 (48.92% |
| | | | | | | | | identity, 65.23% similarity) |
| | | | | | | | | APG02068.0 (46.69% identity, |
| | | | | | | | | 64.35% similarity) |
| | | | | | | | | APG00098.0 |
| | | | | | | | | US_2016_0304898_A1-128 |
| | | | | | | | | (44.96% identity, 61.96% |
| | | | | | | | | similarity) |
| | | | | | | | | APG00360.0 |
| | | | | | | | | US_2016_0355842_A1-69 |
| | | | | | | | | (44.85% identity, 61.82% |
| | | | | | | | | similarity) |
| | | | | | | | | APG00899.0 |
| | | | | | | | | US_2016_0355842_A1-188 |
| | | | | | | | | (44.67% identity, 61.67% |
| | | | | | | | | similarity) |
| | | | | | | | | APG00907.0 |
| | | | | | | | | US_2016_0311864_A1-225 |
| | | | | | | | | (40.0% identity, 59.38% |
| | | | | | | | | similarity) |
| | | | | | | | | APG00332.0 |
| | | | | | | | | US_2016_0355842_A1-64 |
| | | | | | | | | (39.38% identity, 58.44% |
| | | | | | | | | similarity) |
| | | | | | | | | US_8318900_B2-191 (39.26% |
| | | | | | | | | identity, 56.44% similarity) |
| APG01993.0 | 55 | 56 | | | MTX | 95, 96, 97, 98, 99, 100 | 96, 97, 98, 99, 100 | WP_000794514.1 (95.65% |
| | | | | | | | | identity, 95.96% similarity) |
| | | | | | | | | APG00146.0 |
| | | | | | | | | US_2016_0304898_A1-166 |
| | | | | | | | | (94.1% identity, 95.34% |
| | | | | | | | | similarity) |
| | | | | | | | | APG00590.0 |
| | | | | | | | | US_2016_0311864_A1-193 |
| | | | | | | | | (68.39% identity, 80.85% |
| | | | | | | | | similarity) |
| | | | | | | | | US_8318900_B2-78 (65.77% |
| | | | | | | | | identity, 77.78% similarity) |
| | | | | | | | | APG00387.0 |
| | | | | | | | | US_2016_0366881_A1-45 |
| | | | | | | | | (64.65% identity, 74.92% |
| | | | | | | | | similarity) |
| | | | | | | | | APG00351.0 |
| | | | | | | | | US_2016_0366881_A1-28 |
| | | | | | | | | (63.08% identity, 75.58% |
| | | | | | | | | similarity) |
| | | | | | | | | US_2015_0218583_A1-5 |
| | | | | | | | | (62.96% identity, 72.65% |
| | | | | | | | | similarity) |
| | | | | | | | | ANN35739.1 (62.88% |
| | | | | | | | | identity, 76.69% similarity) |
| | | | | | | | | CA_2844913-102 (62.58% |
| | | | | | | | | identity, 75.77% similarity) |
| | | | | | | | | APG09155.0 (61.04% |
| | | | | | | | | identity, 75.15% similarity) |
| APG02007.0 | 57 | 58 | | | MTX | 85, 90, 91, 92, 93, 94, 95, 96, | 90, 91, 92, 93, 94, | WP_016099228.1 (93.02% |
| | | | | | | 97, 98, 99, 100 | 95, 96, 97, 98, | identity, 96.01% similarity) |
| | | | | | | | 99, 100 | OUB62697.1 (84.05% |
| | | | | | | | | identity, 89.04% similarity) |
| | | | | | | | | APG00765.0 (82.98% |
| | | | | | | | | identity, 86.02% similarity) |
| | | | | | | | | APG09869.0 (82.62% |
| | | | | | | | | identity, 86.89% similarity) |
| | | | | | | | | APG00693.0 (82.46% |
| | | | | | | | | identity, 86.46% similarity) |
| | | | | | | | | APG06727.0 (79.88% |
| | | | | | | | | identity, 82.8% similarity) |
| | | | | | | | | US_8461415_B2-31 (77.85% |
| | | | | | | | | identity, 82.46% similarity) |
| | | | | | | | | OUB77698.1 (76.77% |
| | | | | | | | | identity, 85.81% similarity) |
| | | | | | | | | APG00495.0 (73.7% identity, |
| | | | | | | | | 81.35% similarity) |
| | | | | | | | | WP_008180054.1 (54.61% |
| | | | | | | | | identity, 70.72% similarity) |
| APG02021.0 | 59 | 60 | | | MTX | 5, 10, 15, 20, 25, 30, 35, 40, | 5, 10, 15, 20, 25, | KEZ79637.1 (95.51% identity, |
| | | | | | | 45, 50, 55, 60, 65, 70, 75, 80, | 30, 35, 40, 45, | 95.92% similarity) |
| | | | | | | 85, 90, 91, 92, 93, 94, 95, | 50, 55, 60, 65, 70, | |
| | | | | | | 96, 97, 98, 99, 100 | 75, 80, 85, 90, | |
| | | | | | | | 91, 92, 93, 94, | |
| | | | | | | | 95, 96, 97, 98, 99, | |
| | | | | | | | 100 | |
| APG02027.0 | 61 | | | | Cry6 | 92, 93, 94, 95, 96, 97, 98, 99, | 97, 98, 99, 100 | WP_002144456.1 (96.88% |
| | | | | | | 100 | | identity, 99.15% similarity) |
| | | | | | | | | SCC39012.1 (91.78% identity, |
| | | | | | | | | 96.32% similarity) |
| | | | | | | | | APG00951.0 |
| | | | | | | | | US_2016_0366881_A1-136 |
| | | | | | | | | (91.22% identity, 96.32% |
| | | | | | | | | similarity) |
| | | | | | | | | WP_061664310.1 (91.22% |
| | | | | | | | | identity, 96.32% similarity) |
| | | | | | | | | APG00342.0 |
| | | | | | | | | US_2016_0311864_A1-142 |
| | | | | | | | | (91.22% identity, 96.03% |
| | | | | | | | | similarity) |
| | | | | | | | | WP_002169783.1 (90.37% |
| | | | | | | | | identity, 94.05% similarity) |
| | | | | | | | | OTY16424.1 (89.52% identity, |
| | | | | | | | | 94.62% similarity) |
| | | | | | | | | APG00312.0 |
| | | | | | | | | US_2016_0366881_A1-7 |
| | | | | | | | | (89.52% identity, 94.33% |
| | | | | | | | | similarity) |
| | | | | | | | | WP_068533570.1 (81.59% |
| | | | | | | | | identity, 91.22% similarity) |
| | | | | | | | | WP_044876955.1 (79.32% |
| | | | | | | | | identity, 89.52% similarity) |
| APG02031.0 | 62 | | | | Vip4 | 80, 85, 90, 91, 92, 93, 94, 95, | 85, 90, 91, 92, 93, | WP_016123960.1 (99.15% |
| | | | | | | 96, 97, 98, 99, 100 | 94, 95, 96, 97, | identity, 99.68% similarity) |
| | | | | | | | 98, 99, 100 | CA_2844913-129 (75.0% |
| | | | | | | | | identity, 81.8% similarity) |
| | | | | | | | | CA_2844913-130 (75.0% |
| | | | | | | | | identity, 81.8% similarity) |
| | | | | | | | | APG04069.0 (65.7% identity, |
| | | | | | | | | 76.07% similarity) |
| | | | | | | | | EOQ09146.1 (56.34% |
| | | | | | | | | identity, 56.98% similarity) |
| | | | | | | | | APG07032.0 (53.51% identity, |
| | | | | | | | | 66.47% similarity) |
| | | | | | | | | APG01474.0 (53.16% |
| | | | | | | | | identity, 67.5% similarity) |
| | | | | | | | | AGT29561.1 (53.08% identity, |
| | | | | | | | | 66.6% similarity) |
| | | | | | | | | APG02585.0 (52.89% |
| | | | | | | | | identity, 67.07% similarity) |
| | | | | | | | | APG07526.0 (51.83% |
| | | | | | | | | identity, 67.17% similarity) |
| APG02068.0 | 63 | | | | MTX | 50, 55, 60, 65, 70, 75, 80, 85, | 65, 70, 75, 80, 85, | APG04690.0 (54.35% identity, |
| | | | | | | 90, 91, 92, 93, 94, 95, 96, | 90, 91, 92, 93, | 70.19% similarity) |
| | | | | | | 97, 98, 99, 100 | 94, 95, 96, 97, | APG00360.0 |
| | | | | | | | 98, 99, 100 | US_2016_0355842_A1-69 |
| | | | | | | | | (47.08% identity, 62.15% |
| | | | | | | | | similarity) |
| | | | | | | | | APG01122.0 (46.91% identity, |
| | | | | | | | | 64.2% similarity) |
| | | | | | | | | APG01885.0 (46.69% identity, |
| | | | | | | | | 64.35% similarity) |
| | | | | | | | | APG05358.0 (42.55% identity, |
| | | | | | | | | 60.18% similarity) |
| | | | | | | | | US_9328356_B2-46 (40.36% |
| | | | | | | | | identity, 59.64% similarity) |
| | | | | | | | | US_9567381_B2-441 (40.36% |
| | | | | | | | | identity, 59.35% similarity) |
| | | | | | | | | APG00907.0 |
| | | | | | | | | US_2016_0311864_A1-225 |
| | | | | | | | | (40.3% identity, 57.01% |
| | | | | | | | | similarity) |
| | | | | | | | | US_8318900_B2-191 (40.18% |
| | | | | | | | | identity, 56.19% similarity) |
| | | | | | | | | APG00332.0 |
| | | | | | | | | US_2016_0355842_A1-64 |
| | | | | | | | | (39.4% identity, 55.82% |
| | | | | | | | | similarity) |
| APG02083.0 | 64 | 65 | | | MTX | 50, 55, 60, 65, 70, 75, 80, 85, | 70, 75, 80, 85, 90, | WP_006918908.1 (94.92% |
| | | | | | | 90, 91, 92, 93, 94, 95, 96, | 91, 92, 93, 94, | identity, 98.31% similarity) |
| | | | | | | 97, 98, 99, 100 | 95, 96, 97, 98, | APG06048.0 (93.02% identity, |
| | | | | | | | 99, 100 | 96.35% similarity) |
| | | | | | | | | APG01087.0 (45.0% identity, |
| | | | | | | | | 65.0% similarity) |
| | | | | | | | | APG09602.0 (34.28% identity, |
| | | | | | | | | 52.83% similarity) |
| | | | | | | | | WP_065845806.1 (34.28% |
| | | | | | | | | identity, 52.83% similarity) |
| | | | | | | | | APG00143.0 |
| | | | | | | | | US_2016_0355842_A1-4 |
| | | | | | | | | (32.43% identity, 51.95% |
| | | | | | | | | similarity) |
| | | | | | | | | APG04037.0 (32.43% identity, |
| | | | | | | | | 48.35% similarity) |
| | | | | | | | | APG00833.0 |
| | | | | | | | | US_2016_0355842_A1-175 |
| | | | | | | | | (32.33% identity, 51.06% |
| | | | | | | | | similarity) |
| | | | | | | | | APG03867.0 (31.8% identity, |
| | | | | | | | | 50.76% similarity) |
| | | | | | | | | APG03227.0 (31.74% |
| | | | | | | | | identity, 49.1% similarity) |
| APG02187.0 | 66 | 67 | | | MTX | 90, 91, 92, 93, 94, 95, 96, 97, | 93, 94, 95, 96, 97, | US_8461415_B2-26 (87.93% |
| | | | | | | 98, 99, 100 | 98, 99, 100 | identity, 92.39% similarity) |
| | | | | | | | | US_8461415_B2-60 (87.93% |
| | | | | | | | | identity, 92.39% similarity) |
| | | | | | | | | WP_078187999.1 (77.84% |
| | | | | | | | | identity, 85.22% similarity) |
| | | | | | | | | WP_075716659.1 (71.68% |
| | | | | | | | | identity, 80.36% similarity) |
| | | | | | | | | APG08817.0 (59.06% |
| | | | | | | | | identity, 71.65% similarity) |
| | | | | | | | | WP_075716648.1 (58.79% |
| | | | | | | | | identity, 71.92% similarity) |
| | | | | | | | | WP_078188005.1 (52.58% |
| | | | | | | | | identity, 60.31% similarity) |
| | | | | | | | | APG05385.0 (36.69% identity, |
| | | | | | | | | 56.33% similarity) |
| | | | | | | | | APG05653.0 (35.28% |
| | | | | | | | | identity, 54.11% similarity) |
| | | | | | | | | SDW56810.1 (32.23% |
| | | | | | | | | identity, 49.62% similarity) |
| APG02242.0 | 68 | 69 | | | Cry | 90, 91, 92, 93, 94, 95, 96, 97, | 92, 93, 94, 95, 96, | WP_048536348.1 (100.0% |
| | | | | | | 98, 99, 100 | 97, 98, 99, 100 | identity, 100.0% similarity) |
| | | | | | | | | APG08931.0 (85.83% |
| | | | | | | | | identity, 91.99% similarity) |
| | | | | | | | | APG00206.0 |
| | | | | | | | | US_2016_0304898_A1-199 |
| | | | | | | | | (84.8% identity, 91.27% |
| | | | | | | | | similarity) |
| | | | | | | | | APG00061.0 |
| | | | | | | | | US_2016_0304898_A1-92 |
| | | | | | | | | (45.98% identity, 62.96% |
| | | | | | | | | similarity) |
| | | | | | | | | APG02403.0 (45.95% |
| | | | | | | | | identity, 63.64% similarity) |
| | | | | | | | | APG05034.0 (39.82% |
| | | | | | | | | identity, 55.34% similarity) |
| APG02277.0 | 70 | | | | MTX | 60, 65, 70, 75, 80, 85, 90, 91, | 75, 80, 85, 90, 91, | APG00850.0 |
| | | | | | | 92, 93, 94, 95, 96, 97, 98, | 92, 93, 94, 95, | US_2016_0355842_A1-178 |
| | | | | | | 99, 100 | 96, 97, 98, 99, | (55.07% identity, 69.93% |
| | | | | | | | 100 | similarity) |
| | | | | | | | | APG03891.0 (54.71% |
| | | | | | | | | identity, 71.38% similarity) |
| | | | | | | | | US_8461421_B2-74 (54.45% |
| | | | | | | | | identity, 70.82% similarity) |
| | | | | | | | | APG00091.0 |
| | | | | | | | | US_2016_0304898_A1-120 |
| | | | | | | | | (53.74% identity, 70.46% |
| | | | | | | | | similarity) |
| | | | | | | | | APG03249.0 (53.74% |
| | | | | | | | | identity, 70.11% similarity) |
| | | | | | | | | APG00601.0 |
| | | | | | | | | US_2016_0355842_A1-141 |
| | | | | | | | | (53.38% identity, 69.4% |
| | | | | | | | | similarity) |
| | | | | | | | | APG00021.0 |
| | | | | | | | | US_2016_0304898_A1-35 |
| | | | | | | | | (51.96% identity, 70.11% |
| | | | | | | | | similarity) |
| | | | | | | | | APG09904.0 (50.53% identity, |
| | | | | | | | | 68.33% similarity) |
| | | | | | | | | US_2015_0047076_A1-12 |
| | | | | | | | | (31.65% identity, 47.81% |
| | | | | | | | | similarity) |
| | | | | | | | | WO_2015_021354-6 (31.6% |
| | | | | | | | | identity, 48.96% similarity) |
| APG02278.0 | 71 | | | | Vip4 | 70, 75, 80, 85, 90, 91, 92, 93, | 80, 85, 90, 91, 92, | SCC34829.1 (69.73% identity, |
| | | | | | | 94, 95, 96, 97, 98, 99, 100 | 93, 94, 95, 96, | 78.38% similarity) |
| | | | | | | | 97, 98, 99, 100 | APG09984.0 (69.63% |
| | | | | | | | | identity, 79.79% similarity) |
| | | | | | | | | APG00106.0 |
| | | | | | | | | US_2016_0304898_A1-134 |
| | | | | | | | | (69.58% identity, 78.55% |
| | | | | | | | | similarity) |
| | | | | | | | | US_2016_0339078_A1-28464 |
| | | | | | | | | (69.15% identity, 79.04% |
| | | | | | | | | similarity) |
| | | | | | | | | APG09293.0 (67.13% identity, |
| | | | | | | | | 79.23% similarity) |
| | | | | | | | | US_2017_0044568_A1-2 |
| | | | | | | | | (62.27% identity, 73.81% |
| | | | | | | | | similarity) |
| | | | | | | | | APG01927.0 (59.68% |
| | | | | | | | | identity, 69.25% similarity) |
| | | | | | | | | APG04931.0 (56.69% |
| | | | | | | | | identity, 70.79% similarity) |
| | | | | | | | | APG07526.0 (56.6% identity, |
| | | | | | | | | 70.73% similarity) |
| | | | | | | | | AGT29561.1 (55.11% identity, |
| | | | | | | | | 67.34% similarity) |
| APG02299.0 | 72 | | | | Cry | 85, 90, 91, 92, 93, 94, 95, 96, | 92, 93, 94, 95, 96, | CA_2844913-32 (84.56% |
| | | | | | | 97, 98, 99, 100 | 97, 98, 99, 100 | identity, 91.03% similarity) |
| | | | | | | | | APG00581.0 |
| | | | | | | | | US_2016_0355842_A1-133 |
| | | | | | | | | (44.37% identity, 59.29% |
| | | | | | | | | similarity) |
| | | | | | | | | US_8461421_B2-204 (41.9% |
| | | | | | | | | identity, 56.79% similarity) |
| | | | | | | | | US_9567381_B2-376 (41.11% |
| | | | | | | | | identity, 54.74% similarity) |
| | | | | | | | | US_8461421_B2-226 (39.92% |
| | | | | | | | | identity, 54.84% similarity) |
| | | | | | | | | US_8461421_B2-105 (39.81% |
| | | | | | | | | identity, 54.69% similarity) |
| | | | | | | | | US_8461421_B2-45 (39.81% |
| | | | | | | | | identity, 54.69% similarity) |
| | | | | | | | | US_9567381_B2-375 (37.79% |
| | | | | | | | | identity, 51.06% similarity) |
| | | | | | | | | APG06630.0 (35.16% |
| | | | | | | | | identity, 51.16% similarity) |
| | | | | | | | | APG06630.0 (35.16% |
| | | | | | | | | identity, 51.16% similarity) |
| | | | | | | | | WP_001075423.1 (35.16% |
| | | | | | | | | identity, 50.8% similarity) |
| APG02401.0 | 73 | 74 | | | MTX | 90, 91, 92, 93, 94, 95, 96, 97, | 95, 96, 97, 98, 99, | WP_018673409.1 (100.0% |
| | | | | | | 98, 99, 100 | 100 | identity, 100.0% similarity) |
| | | | | | | | | APG00585.0 |
| | | | | | | | | US_2016_0366881_A1-116 |
| | | | | | | | | (88.65% identity, 94.17% |
| | | | | | | | | similarity) |
| | | | | | | | | APG02701.0 (83.13% |
| | | | | | | | | identity, 89.57% similarity) |
| | | | | | | | | APG06560.0 (81.9% identity, |
| | | | | | | | | 89.57% similarity) |
| | | | | | | | | OUB29113.1 (81.6% identity, |
| | | | | | | | | 89.26% similarity) |
| | | | | | | | | APG00851.0 |
| | | | | | | | | US_2016_0311864_A1-222 |
| | | | | | | | | (81.6% identity, 88.96% |
| | | | | | | | | similarity) |
| | | | | | | | | WP_061663532.1 (81.6% |
| | | | | | | | | identity, 88.96% similarity) |
| | | | | | | | | OUB22927.1 (80.67% |
| | | | | | | | | identity, 89.88% similarity) |
| | | | | | | | | APG00427.0 |
| | | | | | | | | US_2016_0311864_A1-178 |
| | | | | | | | | (80.67% identity, 89.26% |
| | | | | | | | | similarity) |
| | | | | | | | | OTY49008.1 (71.73% identity, |
| | | | | | | | | 81.76% similarity) |
| APG02439.0 | 75 | | | | Cry | 30, 35, 40, 45, 50, 55, 60, 65, | 45, 50, 55, 60, 65, | APG00313.0 |
| | | | | | | 70, 75, 80, 85, 90, 91, 92, | 70, 75, 80, 85, | US_2016_0366881_A1-8 |
| | | | | | | 93, 94, 95, 96, 97, 98, 99, 100 | 90, 91, 92, 93, | (25.71% identity, 40.57% |
| | | | | | | | 94, 95, 96, 97, 98, | similarity) |
| | | | | | | | 99, 100 | OTX35247.1 (25.71% identity, |
| | | | | | | | | 40.57% similarity) |
| | | | | | | | | APG00363.0 |
| | | | | | | | | US_2016_0366881_A1-34 |
| | | | | | | | | (25.3% identity, 39.16% |
| | | | | | | | | similarity) |
| APG02471.0 | 76 | | | | MTX | 45, 50, 55, 60, 65, 70, 75, 80, | 70, 75, 80, 85, 90, | APG00236.0 |
| | | | | | | 85, 90, 91, 92, 93, 94, 95, | 91, 92, 93, 94, | US_2016_0355842_A1-32 |
| | | | | | | 96, 97, 98, 99, 100 | 95, 96, 97, 98, | (44.48% identity, 66.9% |
| | | | | | | | 99, 100 | similarity) |
| | | | | | | | | APG00598.0 |
| | | | | | | | | US_2016_0355842_A1-140 |
| | | | | | | | | (32.68% identity, 50.0% |
| | | | | | | | | similarity) |
| | | | | | | | | APG02633.0 (32.64% |
| | | | | | | | | identity, 52.43% similarity) |
| APG02577.0 | 77 | 78 | | | MTX | 55, 60, 65, 70, 75, 80, 85, 90, | 65, 70, 75, 80, 85, | APG00156.0 |
| | | | | | | 91, 92, 93, 94, 95, 96, 97, | 90, 91, 92, 93, | US_2016_0355842_A1-6 |
| | | | | | | 98, 99, 100 | 94, 95, 96, 97, | (50.25% identity, 64.18% |
| | | | | | | | 98, 99, 100 | similarity) |
| | | | | | | | | APG00148.0 |
| | | | | | | | | US_2016_0304898_A1-170 |
| | | | | | | | | (34.83% identity, 53.56% |
| | | | | | | | | similarity) |
| | | | | | | | | APG02225.0 (34.05% |
| | | | | | | | | identity, 45.01% similarity) |
| | | | | | | | | APG04900.0 (33.6% identity, |
| | | | | | | | | 45.19% similarity) |
| | | | | | | | | APG01044.0 (31.49% |
| | | | | | | | | identity, 45.84% similarity) |
| | | | | | | | | APG07114.0 (31.17% |
| | | | | | | | | identity, 49.61% similarity) |
| | | | | | | | | APG04067.0 (30.83% |
| | | | | | | | | identity, 48.96% similarity) |
| | | | | | | | | CA_2844913-112 (30.58% |
| | | | | | | | | identity, 46.62% similarity) |
| | | | | | | | | APG03732.0 (30.46% |
| | | | | | | | | identity, 48.73% similarity) |
| | | | | | | | | APG00347.0 |
| | | | | | | | | US_2016_0366881_A1-25 |
| | | | | | | | | (30.31% identity, 46.11% |
| | | | | | | | | similarity) |
| | | | | | | | | OTX36625.1 (30.31% identity, |
| | | | | | | | | 46.11% similarity) |
| APG02635.0 | 79 | | | | PI-PLC | 90, 91, 92, 93, 94, 95, 96, 97, | 90, 91, 92, 93, 94, | APG04008.0 (92.2% identity, |
| | | | | | | 98, 99, 100 | 95, 96, 97, 98, | 94.8% similarity) |
| | | | | | | | 99, 100 | APG00447.0 |
| | | | | | | | | US_2016_0366881_A1-69 |
| | | | | | | | | (85.21% identity, 89.44% |
| | | | | | | | | similarity) |
| | | | | | | | | APG00338.0 |
| | | | | | | | | US_2016_0366881_A1-21 |
| | | | | | | | | (58.56% identity, 63.09% |
| | | | | | | | | similarity) |
| | | | | | | | | WP_050592191.1 (44.63% |
| | | | | | | | | identity, 50.0% similarity) |
| | | | | | | | | WP_078214342.1 (43.96% |
| | | | | | | | | identity, 49.55% similarity) |
| | | | | | | | | OUB75137.1 (37.99% |
| | | | | | | | | identity, 50.98% similarity) |
| | | | | | | | | WP_080120355.1 (36.8% |
| | | | | | | | | identity, 47.36% similarity) |
| | | | | | | | | WP_043990685.1 (35.99% |
| | | | | | | | | identity, 49.35% similarity) |
| | | | | | | | | EOQ00432.1 (35.42% |
| | | | | | | | | identity, 45.59% similarity) |
| | | | | | | | | APG06043.0 (33.84% |
| | | | | | | | | identity, 48.48% similarity) |
| APG02685.0 | 80 | | | | PIP | 80, 85, 90, 91, 92, 93, 94, 95, | 91, 92, 93, 94, 95, | APG04693.0 (99.27% identity, |
| | | | | | | 96, 97, 98, 99, 100 | 96, 97, 98, 99, | 99.27% similarity) |
| | | | | | | | 100 | APG06141.0 (86.81% identity, |
| | | | | | | | | 95.24% similarity) |
| | | | | | | | | CA_2878263-332 (79.49% |
| | | | | | | | | identity, 89.01% similarity) |
| | | | | | | | | APG00659.0 (78.86% |
| | | | | | | | | identity, 85.57% similarity) |
| | | | | | | | | CA_2878263-105 (78.39% |
| | | | | | | | | identity, 90.11% similarity) |
| | | | | | | | | CA_2878263-4 (78.02% |
| | | | | | | | | identity, 89.38% similarity) |
| | | | | | | | | WP_020294695.1 (78.02% |
| | | | | | | | | identity, 89.01% similarity) |
| | | | | | | | | WP_078473056.1 (78.02% |
| | | | | | | | | identity, 89.01% similarity) |
| | | | | | | | | CA_2878263-2 (77.66% |
| | | | | | | | | identity, 89.01% similarity) |
| | | | | | | | | CA_2878263-252 (77.66% |
| | | | | | | | | identity, 89.01% similarity) |
| APG02761.0 | 81 | 82, 83 | | | Bin | 98, 99, 100 | 99, 100 | APG00913.0 |
| | | | | | | | | US_2016_0311864_A1-226 |
| | | | | | | | | (97.78% identity, 98.0% |
| | | | | | | | | similarity) |
| | | | | | | | | APG00118.0 |
| | | | | | | | | US_2016_0311864_A1-28 |
| | | | | | | | | (90.49% identity, 92.26% |
| | | | | | | | | similarity) |
| | | | | | | | | APG06330.0 (88.72% |
| | | | | | | | | identity, 91.81% similarity) |
| | | | | | | | | APG00335.0 |
| | | | | | | | | US_2016_0366881_A1-18 |
| | | | | | | | | (85.62% identity, 90.04% |
| | | | | | | | | similarity) |
| | | | | | | | | APG00398.0 |
| | | | | | | | | US_2016_0311864_A1-165 |
| | | | | | | | | (85.53% identity, 87.63% |
| | | | | | | | | similarity) |
| | | | | | | | | APG00454.0 |
| | | | | | | | | US_2016_0311864_A1-179 |
| | | | | | | | | (85.4% identity, 90.49% |
| | | | | | | | | similarity) |
| | | | | | | | | APG00223.0 |
| | | | | | | | | US_2016_0311864_A1-82 |
| | | | | | | | | (85.4% identity, 90.04% |
| | | | | | | | | similarity) |
| | | | | | | | | APG01790.0 (85.4% identity, |
| | | | | | | | | 89.6% similarity) |
| | | | | | | | | APG00242.0 |
| | | | | | | | | US_2016_0311864_A1-93 |
| | | | | | | | | (85.18% identity, 90.04% |
| | | | | | | | | similarity) |
| | | | | | | | | WP_002187944.1 (78.54% |
| | | | | | | | | identity, 82.3% similarity) |
| APG02776.0 | 84 | 85 | | | Cry | 93, 94, 95, 96, 97, 98, 99, 100 | 94, 95, 96, 97, 98, | WP_016083794.1 (100.0% |
| | | | | | | | 99, 100 | identity, 100.0% similarity) |
| | | | | | | | | APG00109.0 |
| | | | | | | | | US_2016_0304898_A1-135 |
| | | | | | | | | (92.07% identity, 93.12% |
| | | | | | | | | similarity) |
| | | | | | | | | CA_2844913-30 (80.5% |
| | | | | | | | | identity, 83.35% similarity) |
| | | | | | | | | APG00026.0 |
| | | | | | | | | US_2016_0304898_A1-43 |
| | | | | | | | | (72.88% identity, 84.05% |
| | | | | | | | | similarity) |
| | | | | | | | | APG00781.0 (71.85% |
| | | | | | | | | identity, 82.25% similarity) |
| | | | | | | | | AFU17323.1 (65.67% identity, |
| | | | | | | | | 73.94% similarity) |
| | | | | | | | | ADV33304.1 (65.56% identity, |
| | | | | | | | | 73.82% similarity) |
| | | | | | | | | US_7919272_B2-27 (64.42% |
| | | | | | | | | identity, 75.48% similarity) |
| | | | | | | | | US_7919272_B2-14 (63.58% |
| | | | | | | | | identity, 74.5% similarity) |
| | | | | | | | | US_7919272_B2-2 (63.58% |
| | | | | | | | | identity, 74.5% similarity) |
| APG02801.0 | 86 | 87 | | | MTX | 55, 60, 65, 70, 75, 80, 85, 90, | 70, 75, 80, 85, 90, | KGA84359.1 (100.0% identity, |
| | | | | | | 91, 92, 93, 94, 95, 96, 97, | 91, 92, 93, 94, | 100.0% similarity) |
| | | | | | | 98, 99, 100 | 95, 96, 97, 98, | WP_036224766.1 (99.39% |
| | | | | | | | 99, 100 | identity, 99.7% similarity) |
| | | | | | | | | WP_081937018.1 (96.97% |
| | | | | | | | | identity, 96.97% similarity) |
| | | | | | | | | SK691111.1 (78.31% identity, |
| | | | | | | | | 88.86% similarity) |
| | | | | | | | | WP_079562232.1 (78.08% |
| | | | | | | | | identity, 88.59% similarity) |
| | | | | | | | | APG00552.0 |
| | | | | | | | | US_2016_0366881_A1-110 |
| | | | | | | | | (50.43% identity, 64.35% |
| | | | | | | | | similarity) |
| | | | | | | | | APG08369.0 (49.85% |
| | | | | | | | | identity, 65.97% similarity) |
| | | | | | | | | OTY48309.1 (48.8% identity, |
| | | | | | | | | 64.37% similarity) |
| | | | | | | | | WP_061885189.1 (48.8% |
| | | | | | | | | identity, 64.37% similarity) |
| | | | | | | | | WP_016078640.1 (48.06% |
| | | | | | | | | identity, 64.18% similarity) |
| APG02808.0 | 88 | 89, 90 | | | MTX | 50, 55, 60, 65, 70, 75, 80, 85, | 65, 70, 75, 80, 85, | APG02970.0 (95.8% identity, |
| | | | | | | 90, 91, 92, 93, 94, 95, 96, | 90, 91, 92, 93, | 96.4% similarity) |
| | | | | | | 97, 98, 99, 100 | 94, 95, 96, 97, | APG05040.0 (87.99% identity, |
| | | | | | | | 98, 99, 100 | 93.09% similarity) |
| | | | | | | | | APG01367.0 (86.49% identity, |
| | | | | | | | | 92.19% similarity) |
| | | | | | | | | APG00793.0 |
| | | | | | | | | US_2016_0355842_A1-170 |
| | | | | | | | | (46.7% identity, 64.47% |
| | | | | | | | | similarity) |
| | | | | | | | | APG09460.0 (41.64% |
| | | | | | | | | identity, 57.79% similarity) |
| | | | | | | | | APG00416.0 |
| | | | | | | | | US_2016_0355842_A1-82 |
| | | | | | | | | (41.6% identity, 57.55% |
| | | | | | | | | similarity) |
| | | | | | | | | WP_072335847.1 (41.36% |
| | | | | | | | | identity, 56.09% similarity) |
| | | | | | | | | APG05956.0 (40.34% |
| | | | | | | | | identity, 56.25% similarity) |
| | | | | | | | | US_8829279_B2-11 (40.17% |
| | | | | | | | | identity, 57.89% similarity) |
| | | | | | | | | SDZ23421.1 (39.0% identity, |
| | | | | | | | | 56.6% similarity) |
| APG02955.0 | 91 | 92 | | | Bin | 85, 90, 91, 92, 93, 94, 95, 96, | 90, 91, 92, 93, 94, | APG00412.0 |
| | | | | | | 97, 98, 99, 100 | 95, 96, 97, 98, | US_2016_0311864_A1-173 |
| | | | | | | | 99, 100 | (80.3% identity, 84.48% |
| | | | | | | | | similarity) |
| | | | | | | | | APG00419.0 |
| | | | | | | | | US_2016_0311864_A1-176 |
| | | | | | | | | (79.75% identity, 86.0% |
| | | | | | | | | similarity) |
| | | | | | | | | APG00844.0 |
| | | | | | | | | US_2016_0311864_A1-221 |
| | | | | | | | | (79.04% identity, 84.34% |
| | | | | | | | | similarity) |
| | | | | | | | | APG01059.0 (78.84% identity, |
| | | | | | | | | 84.38% similarity) |
| | | | | | | | | APG00301.0 |
| | | | | | | | | US_2016_0311864_A1-131 |
| | | | | | | | | (78.34% identity, 84.13% |
| | | | | | | | | similarity) |
| | | | | | | | | APG00353.0 |
| | | | | | | | | US_2016_0311864_A1-144 |
| | | | | | | | | (78.09% identity, 84.63% |
| | | | | | | | | similarity) |
| | | | | | | | | APG07334.0 (78.09% |
| | | | | | | | | identity, 84.63% similarity) |
| | | | | | | | | APG01363.0 (78.0% identity, |
| | | | | | | | | 85.25% similarity) |
| | | | | | | | | APG00203.0 |
| | | | | | | | | US_2016_0311864_A1-69 |
| | | | | | | | | (77.33% identity, 83.38% |
| | | | | | | | | similarity) |
| | | | | | | | | APG00229.0 |
| | | | | | | | | US_2016_0311864_A1-84 |
| | | | | | | | | (76.7% identity, 83.25% |
| | | | | | | | | similarity) |
| APG02963.0 | 93 | 94 | | | MTX | 35, 40, 45, 50, 55, 60, 65, 70, | 55, 60, 65, 70, 75, | WP_065097708.1 (100.0% |
| | | | | | | 75, 80, 85, 90, 91, 92, 93, | 80, 85, 90, 91, | identity, 100.0% similarity) |
| | | | | | | 94, 95, 96, 97, 98, 99, 100 | 92, 93, 94, 95, | WP_051388441.1 (34.19% |
| | | | | | | | 96, 97, 98, 99, 100 | identity, 52.26% similarity) |
| | | | | | | | | APG00272.0 |
| | | | | | | | | US_2016_0304898_A1-210 |
| | | | | | | | | (30.97% identity, 50.0% |
| | | | | | | | | similarity) |
| | | | | | | | | APG00825.0 |
| | | | | | | | | US_2016_0355842_A1-174 |
| | | | | | | | | (30.28% identity, 47.95% |
| | | | | | | | | similarity) |
| | | | | | | | | OUB22927.1 (29.34% |
| | | | | | | | | identity, 47.31% similarity) |
| | | | | | | | | APG06560.0 (28.1% identity, |
| | | | | | | | | 49.24% similarity) |
| | | | | | | | | WP_059141116.1 (28.08% |
| | | | | | | | | identity, 47.85% similarity) |
| | | | | | | | | APG00851.0 |
| | | | | | | | | US_2016_0311864_A1-222 |
| | | | | | | | | (28.06% identity, 47.16% |
| | | | | | | | | similarity) |
| | | | | | | | | WP_061663532.1 (28.06% |
| | | | | | | | | identity, 47.16% similarity) |
| | | | | | | | | APG00019.0 |
| | | | | | | | | US_2016_0304898_A1-31 |
| | | | | | | | | (28.06% identity, 44.52% |
| | | | | | | | | similarity) |
| APG02970.0 | 95 | 96 | | | MTX | 50, 55, 60, 65, 70, 75, 80, 85, | 70, 75, 80, 85, 90, | APG02808.0 (95.8% identity, |
| | | | | | | 90, 91, 92, 93, 94, 95, 96, | 91, 92, 93, 94, | 96.4% similarity) |
| | | | | | | 97, 98, 99, 100 | 95, 96, 97, 98, | APG05040.0 (89.67% identity, |
| | | | | | | | 99, 100 | 95.14% similarity) |
| | | | | | | | | APG01367.0 (87.05% identity, |
| | | | | | | | | 92.17% similarity) |
| | | | | | | | | APG00793.0 |
| | | | | | | | | US_2016_0355842_A1-170 |
| | | | | | | | | (47.85% identity, 65.33% |
| | | | | | | | | similarity) |
| | | | | | | | | APG09460.0 (42.05% |
| | | | | | | | | identity, 57.39% similarity) |
| | | | | | | | | APG00416.0 |
| | | | | | | | | US_2016_0355842_A1-82 |
| | | | | | | | | (41.71% identity, 56.57% |
| | | | | | | | | similarity) |
| | | | | | | | | WP_072335847.1 (41.36% |
| | | | | | | | | identity, 56.37% similarity) |
| | | | | | | | | US_8829279_B2-11 (41.18% |
| | | | | | | | | identity, 59.1% similarity) |
| | | | | | | | | APG05956.0 (40.86% |
| | | | | | | | | identity, 56.57% similarity) |
| | | | | | | | | SDZ23421.1 (39.17% identity, |
| | | | | | | | | 56.68% similarity) |
| APG02980.0 | 97 | 98 | | | MTX | 75, 80, 85, 90, 91, 92, 93, 94, | 80, 85, 90, 91, 92, | APG00755.0 |
| | | | | | | 95, 96, 97, 98, 99, 100 | 93, 94, 95, 96, | US_2016_0355842_A1-166 |
| | | | | | | | 97, 98, 99, 100 | (72.51% identity, 79.46% |
| | | | | | | | | similarity) |
| | | | | | | | | WP_002193629.1 (56.64% |
| | | | | | | | | identity, 66.96% similarity) |
| | | | | | | | | APG00871.0 (55.65% identity, |
| | | | | | | | | 67.26% similarity) |
| | | | | | | | | APG01051.0 (55.59% identity, |
| | | | | | | | | 65.59% similarity) |
| | | | | | | | | APG00402.0 |
| | | | | | | | | US_2016_0355842_A1-77 |
| | | | | | | | | (48.21% identity, 63.1% |
| | | | | | | | | similarity) |
| | | | | | | | | APG00583.0 |
| | | | | | | | | US_2016_0366881_A1-114 |
| | | | | | | | | (42.9% identity, 58.55% |
| | | | | | | | | similarity) |
| | | | | | | | | WP_042595209.1 (25.85% |
| | | | | | | | | identity, 42.05% similarity) |
| | | | | | | | | US_2003_0049243_A1-38 |
| | | | | | | | | (25.57% identity, 41.76% |
| | | | | | | | | similarity) |
| APG03124.0 | 99 | | 100 | | Cry | 45, 50, 55, 60, 65, 70, 75, 80, | 55, 60, 65, 70, 75, | CA_2516349-7 (40.24% |
| | | | | | | 85, 90, 91, 92, 93, 94, 95, | 80, 85, 90, 91, | identity, 52.42% similarity) |
| | | | | | | 96, 97, 98, 99, 100 | 92, 93, 94, 95, | APG04010.0 (39.37% identity, |
| | | | | | | | 96, 97, 98, 99, 100 | 52.67% similarity) |
| | | | | | | | | CA_2516349-9 (39.2% |
| | | | | | | | | identity, 51.36% similarity) |
| | | | | | | | | CA_2516349-8 (39.07% |
| | | | | | | | | identity, 51.36% similarity) |
| | | | | | | | | APG00076.0 |
| | | | | | | | | US_2016_0177333_A1-41 |
| | | | | | | | | (36.68% identity, 51.85% |
| | | | | | | | | similarity) |
| | | | | | | | | APG00981.0 (36.46% |
| | | | | | | | | identity, 52.41% similarity) |
| | | | | | | | | APG00726.0 (35.73% |
| | | | | | | | | identity, 50.0% similarity) |
| | | | | | | | | CA_2516349-11 (35.28% |
| | | | | | | | | identity, 46.82% similarity) |
| | | | | | | | | APG00582.0 |
| | | | | | | | | US_2016_0366881_A1-112 |
| | | | | | | | | (34.41% identity, 47.1% |
| | | | | | | | | similarity) |
| | | | | | | | | US_8461421_B2-120 (34.23% |
| | | | | | | | | identity, 48.32% similarity) |
| APG03192.0 | 101 | 102 | | | MTX | 90, 91, 92, 93, 94, 95, 96, 97, | 91, 92, 93, 94, 95, | APG00311.0 |
| | | | | | | 98, 99, 100 | 96, 97, 98, 99, | US_2016_0366881_A1-6 |
| | | | | | | | 100 | (86.67% identity, 90.86% |
| | | | | | | | | similarity) |
| | | | | | | | | OUB06458.1 (86.67% |
| | | | | | | | | identity, 90.86% similarity) |
| | | | | | | | | APG07034.0 (50.12% identity, |
| | | | | | | | | 64.76% similarity) |
| | | | | | | | | CA_2844913-106 (48.29% |
| | | | | | | | | identity, 62.68% similarity) |
| | | | | | | | | APG00488.0 |
| | | | | | | | | US_2016_0355842_A1-108 |
| | | | | | | | | (35.87% identity, 53.36% |
| | | | | | | | | similarity) |
| | | | | | | | | APG04865.0 (35.21% identity, |
| | | | | | | | | 53.27% similarity) |
| | | | | | | | | US_8318900_B2-76 (28.93% |
| | | | | | | | | identity, 38.72% similarity) |
| | | | | | | | | APG00470.0 |
| | | | | | | | | US_2016_0366881_A1-84 |
| | | | | | | | | (25.31% identity, 37.66% |
| | | | | | | | | similarity) |
| | | | | | | | | OUB08317.1 (25.31% |
| | | | | | | | | identity, 37.66% similarity) |
| APG03223.0 | 103 | 104 | | | Bin | 65, 70, 75, 80, 85, 90, 91, 92, | 80, 85, 90, 91, 92, | WP_016107065.1 (100.0% |
| | | | | | | 93, 94, 95, 96, 97, 98, 99, | 93, 94, 95, 96, | identity, 100.0% similarity) |
| | | | | | | 100 | 97, 98, 99, 100 | WP_070189649.1 (94.04% |
| | | | | | | | | identity, 97.02% similarity) |
| | | | | | | | | OFC99037.1 (86.33% identity, |
| | | | | | | | | 89.07% similarity) |
| | | | | | | | | WP_002166959.1 (70.47% |
| | | | | | | | | identity, 78.41% similarity) |
| | | | | | | | | WP_002191947.1 (70.22% |
| | | | | | | | | identity, 78.41% similarity) |
| | | | | | | | | CA_2844913-148 (63.96% |
| | | | | | | | | identity, 73.27% similarity) |
| | | | | | | | | APG00925.0 |
| | | | | | | | | US_2016_0311864_A1-227 |
| | | | | | | | | (63.43% identity, 72.01% |
| | | | | | | | | similarity) |
| | | | | | | | | APG00262.0 |
| | | | | | | | | US_2016_0311864_A1-101 |
| | | | | | | | | (63.18% identity, 72.05% |
| | | | | | | | | similarity) |
| | | | | | | | | APG00724.0 (62.81% |
| | | | | | | | | identity, 74.38% similarity) |
| | | | | | | | | APG01363.0 (62.47% |
| | | | | | | | | identity, 74.32% similarity) |
| APG03444.0 | 105 | 106 | | | MTX | 85, 90, 91, 92, 93, 94, 95, 96, | 90, 91, 92, 93, 94, | APG00325.0 |
| | | | | | | 97, 98, 99, 100 | 95, 96, 97, 98, | US_2016_0366881_A1-12 |
| | | | | | | | 99, 100 | (80.23% identity, 87.11% |
| | | | | | | | | similarity) |
| | | | | | | | | WP_016099611.1 (62.17% |
| | | | | | | | | identity, 76.83% similarity) |
| | | | | | | | | APG00384.0 |
| | | | | | | | | US_2016_0366881_A1-44 |
| | | | | | | | | (50.28% identity, 66.95% |
| | | | | | | | | similarity) |
| | | | | | | | | APG01969.0 (50.0% identity, |
| | | | | | | | | 66.11% similarity) |
| | | | | | | | | OUA92412.1 (43.54% |
| | | | | | | | | identity, 61.24% similarity) |
| | | | | | | | | APG03015.0 (43.45% |
| | | | | | | | | identity, 60.45% similarity) |
| | | | | | | | | APG00344.0 |
| | | | | | | | | US_2016_0366881_A1-22 |
| | | | | | | | | (42.9% identity, 59.89% |
| | | | | | | | | similarity) |
| | | | | | | | | OUB77483.1 (42.78% |
| | | | | | | | | identity, 60.62% similarity) |
| | | | | | | | | OUC03766.1 (42.13% |
| | | | | | | | | identity, 59.83% similarity) |
| | | | | | | | | WP_016098287.1 (41.64% |
| | | | | | | | | identity, 60.06% similarity) |
| APG03497.0 | 107 | | | | Bin | 35, 40, 45, 50, 55, 60, 65, 70, | 50, 55, 60, 65, 70, | APG00144.0 |
| | | | | | | 75, 80, 85, 90, 91, 92, 93, | 75, 80, 85, 90, | US_2016_0177333_A1-81 |
| | | | | | | 94, 95, 96, 97, 98, 99, 100 | 91, 92, 93, 94, | (30.77% identity, 45.13% |
| | | | | | | | 95, 96, 97, 98, 99, | similarity) |
| | | | | | | | 100 | WP_048517129.1 (26.43% |
| | | | | | | | | identity, 47.68% similarity) |
| | | | | | | | | WP_002090518.1 (25.89% |
| | | | | | | | | identity, 47.41% similarity) |
| | | | | | | | | APG04004.0 (25.87% identity, |
| | | | | | | | | 45.07% similarity) |
| | | | | | | | | APG00837.0 (25.27% |
| | | | | | | | | identity, 45.43% similarity) |
| | | | | | | | | OTW86911.1 (25.26% |
| | | | | | | | | identity, 41.67% similarity) |
| | | | | | | | | APG04536.0 (25.2% identity, |
| | | | | | | | | 40.42% similarity) |
| | | | | | | | | WP_016093722.1 (25.2% |
| | | | | | | | | identity, 40.42% similarity) |
| APG03506.0 | 108 | 109 | | | MTX | 90, 91, 92, 93, 94, 95, 96, 97, | 92, 93, 94, 95, 96, | APG07783.0 (87.2% identity, |
| | | | | | | 98, 99, 100 | 97, 98, 99, 100 | 91.07% similarity) |
| | | | | | | | | APG00276.0 |
| | | | | | | | | US_2016_0355842_A1-47 |
| | | | | | | | | (32.19% identity, 47.29% |
| | | | | | | | | similarity) |
| | | | | | | | | APG00545.0 |
| | | | | | | | | US_2016_0355842_A1-122 |
| | | | | | | | | (29.71% identity, 44.57% |
| | | | | | | | | similarity) |
| | | | | | | | | APG08369.0 (29.41% |
| | | | | | | | | identity, 43.98% similarity) |
| | | | | | | | | APG00671.0 |
| | | | | | | | | US_2016_0355842_A1-157 |
| | | | | | | | | (27.87% identity, 48.28% |
| | | | | | | | | similarity) |
| | | | | | | | | APG00552.0 |
| | | | | | | | | US_2016_0366881_A1-110 |
| | | | | | | | | (27.25% identity, 41.96% |
| | | | | | | | | similarity) |
| | | | | | | | | APG00362.0 |
| | | | | | | | | US_2016_0366881_A1-33 |
| | | | | | | | | (26.89% identity, 43.42% |
| | | | | | | | | similarity) |
| APG03543.0 | 110 | 111 | | | MTX | 96, 97, 98, 99, 100 | 98, 99, 100 | APG00505.0 |
| | | | | | | | | US_2016_0366881_A1-101 |
| | | | | | | | | (95.12% identity, 97.56% |
| | | | | | | | | similarity) |
| | | | | | | | | OUB07573.1 (95.12% |
| | | | | | | | | identity, 97.56% similarity) |
| | | | | | | | | US_8318900_B2-75 (80.6% |
| | | | | | | | | identity, 87.76% similarity) |
| | | | | | | | | APG04781.0 (76.97% identity, |
| | | | | | | | | 84.26% similarity) |
| | | | | | | | | US_8318900_B2-76 (74.11% |
| | | | | | | | | identity, 84.23% similarity) |
| | | | | | | | | APG00858.0 (62.17% identity, |
| | | | | | | | | 73.9% similarity) |
| | | | | | | | | APG00339.0 |
| | | | | | | | | US_2016_0355842_A1-65 |
| | | | | | | | | (61.81% identity, 73.76% |
| | | | | | | | | similarity) |
| | | | | | | | | APG08693.0 (43.19% |
| | | | | | | | | identity, 57.1% similarity) |
| | | | | | | | | OUB07579.1 (43.19% |
| | | | | | | | | identity, 57.1% similarity) |
| | | | | | | | | OUB27300.1 (35.71% |
| | | | | | | | | identity, 50.57% similarity) |
| APG03593.0 | 112 | 113 | | | MTX | 5, 10, 15, 20, 25, 30, 35, 40, | 5, 10, 15, 20, 25, | |
| | | | | | | 45, 50, 55, 60, 65, 70, 75, 80, | 30, 35, 40, 45, | |
| | | | | | | 85, 90, 91, 92, 93, 94, 95, | 50, 55, 60, 65, 70, | |
| | | | | | | 96, 97, 98, 99, 100 | 75, 80, 85, 90, | |
| | | | | | | | 91, 92, 93, 94, | |
| | | | | | | | 95, 96, 97, 98, 99, | |
| | | | | | | | 100 | |
| APG03601.0 | 114 | | | | MTX | 5, 10, 15, 20, 25, 30, 35, 40, | 5, 10, 15, 20, 25, | WP_028546760.1 (96.9% |
| | | | | | | 45, 50, 55, 60, 65, 70, 75, 80, | 30, 35, 40, 45, | identity, 98.45% similarity) |
| | | | | | | 85, 90, 91, 92, 93, 94, 95, | 50, 55, 60, 65, 70, | KQO17200.1 (68.11% |
| | | | | | | 96, 97, 98, 99, 100 | 75, 80, 85, 90, | identity, 85.76% similarity) |
| | | | | | | | 91, 92, 93, 94, | WP_082110926.1 (67.79% |
| | | | | | | | 95, 96, 97, 98, 99, | identity, 84.97% similarity) |
| | | | | | | | 100 | ANY69042.1 (67.49% identity, |
| | | | | | | | | 84.83% similarity) |
| | | | | | | | | WP_081418545.1 (67.48% |
| | | | | | | | | identity, 84.97% similarity) |
| | | | | | | | | WP_006040645.1 (55.42% |
| | | | | | | | | identity, 75.54% similarity) |
| | | | | | | | | WP_002637449.1 (38.87% |
| | | | | | | | | identity, 54.9% similarity) |
| APG03638.0 | 115 | 116 | | | MTX | 80, 85, 90, 91, 92, 93, 94, 95, | 90, 91, 92, 93, 94, | OOR71217.1 (100.0% |
| | | | | | | 96, 97, 98, 99, 100 | 95, 96, 97, 98, | identity, 100.0% similarity) |
| | | | | | | | 99, 100 | APG08605.0 (99.71% identity, |
| | | | | | | | | 100.0% similarity) |
| | | | | | | | | WP_078187960.1 (80.51% |
| | | | | | | | | identity, 80.51% similarity) |
| | | | | | | | | APG03848.0 (78.39% |
| | | | | | | | | identity, 85.88% similarity) |
| | | | | | | | | WP_075718639.1 (77.52% |
| | | | | | | | | identity, 84.73% similarity) |
| | | | | | | | | WP_075716873.1 (76.95% |
| | | | | | | | | identity, 84.15% similarity) |
| | | | | | | | | WP_078187232.1 (59.51% |
| | | | | | | | | identity, 65.93% similarity) |
| | | | | | | | | APG01197.0 (46.14% identity, |
| | | | | | | | | 50.97% similarity) |
| | | | | | | | | APG05787.0 (37.82% identity, |
| | | | | | | | | 52.66% similarity) |
| | | | | | | | | CA_2844913-116 (35.83% |
| | | | | | | | | identity, 40.37% similarity) |
| APG03701.0 | 117 | | | | MTX | 55, 60, 65, 70, 75, 80, 85, 90, | 70, 75, 80, 85, 90, | APG08369.0 (51.38% |
| | | | | | | 91, 92, 93, 94, 95, 96, 97, | 91, 92, 93, 94, | identity, 66.67% similarity) |
| | | | | | | 98, 99, 100 | 95, 96, 97, 98, | OTY48309.1 (50.74% identity, |
| | | | | | | | 99, 100 | 66.37% similarity) |
| | | | | | | | | WP_061885189.1 (50.74% |
| | | | | | | | | identity, 66.37% similarity) |
| | | | | | | | | APG00244.0 |
| | | | | | | | | US_2016_0355842_A1-33 |
| | | | | | | | | (49.7% identity, 64.24% |
| | | | | | | | | similarity) |
| | | | | | | | | APG00541.0 |
| | | | | | | | | US_2016_0355842_A1-119 |
| | | | | | | | | (49.39% identity, 64.55% |
| | | | | | | | | similarity) |
| | | | | | | | | APG04746.0 (49.38% identity, |
| | | | | | | | | 65.62% similarity) |
| | | | | | | | | APG00509.0 |
| | | | | | | | | US_2016_0355842_A1-113 |
| | | | | | | | | (49.09% identity, 64.55% |
| | | | | | | | | similarity) |
| | | | | | | | | APG00552.0 |
| | | | | | | | | US_2016_0366881_A1-110 |
| | | | | | | | | (47.97% identity, 64.83% |
| | | | | | | | | similarity) |
| | | | | | | | | APG00896.0 |
| | | | | | | | | US_2016_0355842_A1-185 |
| | | | | | | | | (47.4% identity, 65.75% |
| | | | | | | | | similarity) |
| | | | | | | | | APG00362.0 |
| | | | | | | | | US_2016_0366881_A1-33 |
| | | | | | | | | (45.07% identity, 62.99% |
| | | | | | | | | similarity) |
| APG03791.0 | 118 | 119, 120 | | | Vip4 | 100 | 100 | US_2016_0339078_A1-28124 |
| | | | | | | | | (99.67% identity, 99.67% |
| | | | | | | | | similarity) |
| | | | | | | | | APG04931.0 (63.75% |
| | | | | | | | | identity, 72.4% similarity) |
| | | | | | | | | APG07526.0 (60.86% |
| | | | | | | | | identity, 70.35% similarity) |
| | | | | | | | | SCC38903.1 (60.1% identity, |
| | | | | | | | | 69.85% similarity) |
| | | | | | | | | WP_048561796.1 (59.96% |
| | | | | | | | | identity, 71.27% similarity) |
| | | | | | | | | SCL96146.1 (59.96% identity, |
| | | | | | | | | 70.97% similarity) |
| | | | | | | | | WP_053512697.1 (59.96% |
| | | | | | | | | identity, 70.87% similarity) |
| | | | | | | | | APG08414.0 (59.11% identity, |
| | | | | | | | | 69.95% similarity) |
| | | | | | | | | OUB59180.1 (58.41% |
| | | | | | | | | identity, 68.16% similarity) |
| | | | | | | | | APG09545.0 (54.69% |
| | | | | | | | | identity, 64.45% similarity) |
| APG03964.0 | 121 | | | | Bin | 93, 94, 95, 96, 97, 98, 99, 100 | 96, 97, 98, 99, 100 | APG00167.0 |
| | | | | | | | | US_2016_0304898_A1-180 |
| | | | | | | | | (92.35% identity, 95.1% |
| | | | | | | | | similarity) |
| | | | | | | | | APG00050.0 |
| | | | | | | | | US_2016_0304898_A1-80 |
| | | | | | | | | (43.47% identity, 54.29% |
| | | | | | | | | similarity) |
| | | | | | | | | APG00557.0 (39.39% |
| | | | | | | | | identity, 49.81% similarity) |
| | | | | | | | | APG00474.0 |
| | | | | | | | | US_2016_0366881_A1-89 |
| | | | | | | | | (38.68% identity, 48.94% |
| | | | | | | | | similarity) |
| | | | | | | | | APG00629.0 |
| | | | | | | | | US_2016_0366881_A1-126 |
| | | | | | | | | (38.04% identity, 48.78% |
| | | | | | | | | similarity) |
| | | | | | | | | APG00461.0 |
| | | | | | | | | US_2016_0311864_A1-182 |
| | | | | | | | | (35.92% identity, 49.82% |
| | | | | | | | | similarity) |
| | | | | | | | | APG08101.0 (31.82% identity, |
| | | | | | | | | 46.91% similarity) |
| | | | | | | | | APG00750.0 |
| | | | | | | | | US_2016_0366881_A1-132 |
| | | | | | | | | (27.59% identity, 39.37% |
| | | | | | | | | similarity) |
| | | | | | | | | APG0706.0 (26.62% |
| | | | | | | | | identity, 36.95% similarity) |
| | | | | | | | | APG00734.0 |
| | | | | | | | | US_2016_0366881_A1-131 |
| | | | | | | | | (26.47% identity, 42.21% |
| | | | | | | | | similarity) |
| APG04004.0 | 122 | | | | Bin | 35, 40, 45, 50, 55, 60, 65, 70, | 55, 60, 65, 70, 75, | APG00256.0 |
| | | | | | | 75, 80, 85, 90, 91, 92, 93, | 80, 85, 90, 91, | US_2016_0355842_A1-41 |
| | | | | | | 94, 95, 96, 97, 98, 99, 100 | 92, 93, 94, 95, | (32.8% identity, 46.13% |
| | | | | | | | 96, 97, 98, 99, 100 | similarity |
| | | | | | | | | ANS52220.1 (32.7% identity, |
| | | | | | | | | 47.16% similarity) |
| | | | | | | | | ANS52219.1 (32.55% identity, |
| | | | | | | | | 46.88% similarity) |
| | | | | | | | | APG00642.0 |
| | | | | | | | | US_2016_0311864_A1-202 |
| | | | | | | | | (32.23% identity, 47.66% |
| | | | | | | | | similarity) |
| | | | | | | | | OTZ68983.1 (32.22% identity, |
| | | | | | | | | 48.71% similarity) |
| | | | | | | | | APG00880.0 |
| | | | | | | | | US_2016_0366881_A1-134 |
| | | | | | | | | (32.16% identity, 50.0% |
| | | | | | | | | similarity) |
| | | | | | | | | US_8461421_B2_148 (31.84% |
| | | | | | | | | identity, 45.79% similarity) |
| | | | | | | | | US_8461421_B2-4 (31.83% |
| | | | | | | | | identity, 49.62% similarity) |
| | | | | | | | | US_8461421_B2-64 (31.83% |
| | | | | | | | | identity, 49.62% similarity) |
| | | | | | | | | APG00215.0 |
| | | | | | | | | US_2016_0311864_A1-78 |
| | | | | | | | | (31.71% identity, 52.3% |
| | | | | | | | | similarity) |
| APG04008.0 | 123 | | | | PI-PLC | 85, 90, 91, 92, 93, 94, 95, 96, | 90, 91, 92, 93, 94, | APG02635.0 (92.2% identity, |
| | | | | | | 97, 98, 99, 100 | 95, 96, 97, 98, | 94.8% similarity) |
| | | | | | | | 99, 100 | APG00447.0 |
| | | | | | | | | US_2016_0366881_A1-69 |
| | | | | | | | | (82.39% identity, 87.09% |
| | | | | | | | | similarity) |
| | | | | | | | | APG00338.0 |
| | | | | | | | | US_2016_0366881_A1-21 |
| | | | | | | | | (57.67% identity, 62.23% |
| | | | | | | | | similarity) |
| | | | | | | | | WP_050592191.1 (44.03% |
| | | | | | | | | identity, 48.36% similarity) |
| | | | | | | | | WP_078214342.1 (42.84% |
| | | | | | | | | identity, 47.96% similarity) |
| | | | | | | | | EAZ84205.1 (38.76% identity, |
| | | | | | | | | 52.98% similarity |
| | | | | | | | | OUB75137.1 (38.7% identity, |
| | | | | | | | | 52.14% similarity) |
| | | | | | | | | OUB84415.1 (38.29% |
| | | | | | | | | identity, 51.73% similarity) |
| | | | | | | | | WP_080120355.1 (37.04% |
| | | | | | | | | identity, 48.15% similarity |
| | | | | | | | | APG06043.0 (36.63% |
| | | | | | | | | identity, 51.09% similarity) |
| APG04010.0 | 124 | 125 | | | Cry | 85, 90, 91, 92, 93, 94, 95, 96, | 90, 91, 92, 93, 94, | CA_2516349-9 (83.2% |
| | | | | | | 97, 98, 99, 100 | 95, 96, 97, 98, | identity, 89.11% similarity) |
| | | | | | | | 99, 100 | CA_2516349-8 (82.93% |
| | | | | | | | | identity, 88.84% similarity) |
| | | | | | | | | CA_2516349-11 (78.2% |
| | | | | | | | | identity, 83.45% similarity) |
| | | | | | | | | CA_2516349-7 (77.94% |
| | | | | | | | | identity, 86.33% similarity) |
| | | | | | | | | APG00726.0 (69.08% |
| | | | | | | | | identity, 78.95% similarity) |
| | | | | | | | | APG00076.0 |
| | | | | | | | | US_2016_0177333_A1-41 |
| | | | | | | | | (40.2% identity, 54.24% |
| | | | | | | | | similarity) |
| | | | | | | | | APG00981.0 (39.44% |
| | | | | | | | | identity, 54.29% similarity) |
| | | | | | | | | APG03124.0 (39.37% identity, |
| | | | | | | | | 52.67% similarity) |
| | | | | | | | | US_9567381_B2-424 (37.02% |
| | | | | | | | | identity, 51.03% similarity) |
| | | | | | | | | US_2016_0345590_A1-2 |
| | | | | | | | | (36.36% identity, 51.86% |
| | | | | | | | | similarity) |
| APG04037.0 | 126 | 127 | | | MTX | 80, 85, 90, 91, 92, 93, 94, 95, | 85, 90, 91, 92, 93, | APG03867.0 (78.83% |
| | | | | | | 96, 97, 98, 99, 100 | 94, 95, 96, 97, | identity, 83.74% similarity) |
| | | | | | | | 98, 99, 100 | APG09572.0 (78.19% identity, |
| | | | | | | | | 84.74% similarity) |
| | | | | | | | | APG03227.0 (75.77% |
| | | | | | | | | identity, 83.13% similarity) |
| | | | | | | | | APG00143.0 |
| | | | | | | | | US_2016_0355842_A1-4 |
| | | | | | | | | (64.91% identity, 78.88% |
| | | | | | | | | similarity) |
| | | | | | | | | APG00444.0 |
| | | | | | | | | US_2016_0355842_A1-93 |
| | | | | | | | | (64.2% identity, 79.63% |
| | | | | | | | | similarity) |
| | | | | | | | | APG00441.0 |
| | | | | | | | | US_2016_0355842_A1-91 |
| | | | | | | | | (63.89% identity, 79.32% |
| | | | | | | | | similarity) |
| | | | | | | | | APG00833.0 |
| | | | | | | | | US_2016_0355842_A1-175 |
| | | | | | | | | (63.08% identity, 78.15% |
| | | | | | | | | similarity) |
| | | | | | | | | APG07682.0 (60.67% |
| | | | | | | | | identity, 73.48% similarity) |
| | | | | | | | | APG09602.0 (57.06% identity, |
| | | | | | | | | 70.55% similarity) |
| | | | | | | | | WP_065845806.1 (57.06% |
| | | | | | | | | identity, 70.55% similarity) |
| APG04119.0 | 128 | | | | MTX | 75, 80, 85, 90, 91, 92, 93, 94, | 85, 90, 91, 92, 93, | APG01797.0 (70.68% |
| | | | | | | 95, 96, 97, 98, 99, 100 | 94, 95, 96, 97, | identity, 84.82% similarity) |
| | | | | | | | 98, 99, 100 | APG03217.0 (70.1% identity, |
| | | | | | | | | 84.02% similarity) |
| | | | | | | | | APG08029.0 (69.33% |
| | | | | | | | | identity, 82.99% similarity) |
| | | | | | | | | APG00932.0 (62.4% identity, |
| | | | | | | | | 78.26% similarity) |
| | | | | | | | | ANN35812.1 (28.44% |
| | | | | | | | | identity, 44.31% similarity) |
| APG04342.0 | 129 | 130 | | | MTX | 90, 91, 92, 93, 94, 95, 96, 97, | 95, 96, 97, 98, 99, | APG00020.0 |
| | | | | | | 98, 99, 100 | 100 | US_2016_0304898_A1-33 |
| | | | | | | | | (89.69% identity, 94.15% |
| | | | | | | | | similarity) |
| | | | | | | | | APG01508.0 (89.14% |
| | | | | | | | | identity, 93.87% similarity) |
| | | | | | | | | APG00253.0 |
| | | | | | | | | US_2016_0355842_A1-39 |
| | | | | | | | | (88.3% identity, 93.04% |
| | | | | | | | | similarity) |
| | | | | | | | | APG00764.0 |
| | | | | | | | | US_2016_0355842_A1-168 |
| | | | | | | | | (85.68% identity, 88.86% |
| | | | | | | | | similarity) |
| | | | | | | | | APG00418.0 |
| | | | | | | | | US_2016_0355842_A1-84 |
| | | | | | | | | (84.96% identity, 89.97% |
| | | | | | | | | similarity) |
| | | | | | | | | APG06291.0 (84.62% |
| | | | | | | | | identity, 89.84% similarity) |
| | | | | | | | | APG00646.0 |
| | | | | | | | | US_2016_0355842_A1-201 |
| | | | | | | | | (84.35% identity, 89.12% |
| | | | | | | | | similarity) |
| | | | | | | | | APG03995.0 (84.08% |
| | | | | | | | | identity, 87.8% similarity) |
| | | | | | | | | APG00704.0 |
| | | | | | | | | US_2016_0355842_A1-161 |
| | | | | | | | | (83.79% identity, 89.01% |
| | | | | | | | | similarity) |
| | | | | | | | | WP_071770709.1 (83.79% |
| | | | | | | | | identity, 89.01% similarity) |
| APG04407.0 | 131 | | | | Cry | 75, 80, 85, 90, 91, 92, 93, 94, | 85, 90, 91, 92, 93, | APG00100.0 |
| | | | | | | 95, 96, 97, 98, 99, 100 | 94, 95, 96, 97, | US_2016_0304898_A1-130 |
| | | | | | | | 98, 99, 100 | (74.33% identity, 83.72% |
| | | | | | | | | similarity) |
| | | | | | | | | APG00717.0 |
| | | | | | | | | US_2016_0304898_A1-218 |
| | | | | | | | | (71.33% identity, 82.46% |
| | | | | | | | | similarity) |
| | | | | | | | | APG00029.0 |
| | | | | | | | | US_2016_0304898_A1-49 |
| | | | | | | | | (70.66% identity, 82.12% |
| | | | | | | | | similarity) |
| | | | | | | | | APG00367.0 |
| | | | | | | | | US_2016_0355842_A1-71 |
| | | | | | | | | (31.34% identity, 44.88% |
| | | | | | | | | similarity) |
| | | | | | | | | APG00072.0 |
| | | | | | | | | US_2016_0177333_A1-39 |
| | | | | | | | | (27.46% identity, 39.0% |
| | | | | | | | | similarity) |
| | | | | | | | | ABW89739.1 (25.71% |
| | | | | | | | | identity, 41.43% similarity) |
| | | | | | | | | US_9567381_B2-39 (25.46% |
| | | | | | | | | identity, 41.77% similarity) |
| | | | | | | | | EP_2130839-14 (25.39% |
| | | | | | | | | identity, 41.65% similarity) |
| | | | | | | | | ABW89737.1 (25.39% |
| | | | | | | | | identity, 41.51% similarity) |
| | | | | | | | | CA_2754845-9 (25.37% |
| | | | | | | | | identity, 39.27% similarity) |
| APG04409.0 | 132 | | | | MTX | 30, 35, 40, 45, 50, 55, 60, 65, | 50, 55, 60, 65, 70, | CA_2327350-19 (28.97% |
| | | | | | | 70, 75, 80, 85, 90, 91, 92, | 75, 80, 85, 90, | identity, 48.72% similarity) |
| | | | | | | 93, 94, 95, 96, 97, 98, 99, 100 | 91, 92, 93, 94, | CA_2327350-7 (28.97% |
| | | | | | | | 95, 96, 97, 98, 99, | identity, 48.72% similarity) |
| | | | | | | | 100 | CA_2327350-5 (28.72% |
| | | | | | | | | identity, 48.72% similarity) |
| | | | | | | | | CDJ79781.1 (28.46% identity, |
| | | | | | | | | 48.46% similarity) |
| | | | | | | | | CA_2327350-3 (28.39% |
| | | | | | | | | identity, 47.49% similarity) |
| | | | | | | | | CA_2327350-8 (27.95% |
| | | | | | | | | identity, 47.18% similarity) |
| | | | | | | | | CA_2327350-9 (27.44% |
| | | | | | | | | identity, 45.38% similarity) |
| | | | | | | | | CA_2327350-18 (27.32% |
| | | | | | | | | identity, 46.39% similarity) |
| | | | | | | | | CA_2327350-10 (27.23% |
| | | | | | | | | identity, 45.04% similarity) |
| | | | | | | | | OTY50217.1 (26.99% identity, |
| | | | | | | | | 39.76% similarity) |
| | | | | | | | | US_8318900_B2-187 (26.99% |
| | | | | | | | | identity, 39.76% similarity) |
| | | | | | | | | US_8318900_B2-43 (26.99% |
| | | | | | | | | identity, 39.76% similarity) |
| | | | | | | | | US_8318900_B2-92 (26.99% |
| | | | | | | | | identity, 39.76% similarity) |
| APG04479.0 | 133 | 134, 135 | | | MTX | 35, 40, 45, 50, 55, 60, 65, 70, | 55, 60, 65, 70, 75, | APG08369.0 (33.14% |
| | | | | | | 75, 80, 85, 90, 91, 92, 93, | 80, 85, 90, 91, | identity, 50.43% similarity) |
| | | | | | | 94, 95, 96, 97, 98, 99, 100 | 92, 93, 94, 95, | OTY48309.1 (31.88% identity, |
| | | | | | | | 96, 97, 98, 99, 100 | 46.87% similarity) |
| | | | | | | | | WP_061885189.1 (31.88% |
| | | | | | | | | identity, 46.87% similarity) |
| | | | | | | | | APG01993.0 (31.41% identity, |
| | | | | | | | | 48.7% similarity) |
| | | | | | | | | APG00387.0 |
| | | | | | | | | US_2016_0366881_A1-45 |
| | | | | | | | | (31.39% identity, 44.72% |
| | | | | | | | | similarity) |
| | | | | | | | | APG06228.0 (31.02% |
| | | | | | | | | identity, 44.6% similarity) |
| | | | | | | | | APG00980.0 (30.95% |
| | | | | | | | | identity, 43.65% similarity) |
| | | | | | | | | APG00552.0 |
| | | | | | | | | US_2016_0366881_A1-110 |
| | | | | | | | | (30.94% identity, 48.34% |
| | | | | | | | | similarity) |
| | | | | | | | | WP_000794514.1 (30.55% |
| | | | | | | | | identity, 46.69% similarity) |
| | | | | | | | | APG09427.0 (29.77% identity, |
| | | | | | | | | 46.48% similarity) |
| APG04531.0 | 136 | 137 | | | MTX | 75, 80, 85, 90, 91, 92, 93, 94, | 85, 90, 91, 92, 93, | APG09492.0 (70.45% |
| | | | | | | 95, 96, 97, 98, 99, 100 | 94, 95, 96, 97, | identity, 81.49% similarity) |
| | | | | | | | 98, 99, 100 | APG09055.0 (68.55% |
| | | | | | | | | identity, 79.23% similarity) |
| | | | | | | | | APG00794.0 |
| | | | | | | | | US_2016_0355842_A1-171 |
| | | | | | | | | (67.66% identity, 80.71% |
| | | | | | | | | similarity) |
| | | | | | | | | APG00569.0 |
| | | | | | | | | US_2016_0355842_A1-129 |
| | | | | | | | | (67.06% identity, 79.53% |
| | | | | | | | | similarity) |
| | | | | | | | | APG00938.0 |
| | | | | | | | | US_2016_0355842_A1-190 |
| | | | | | | | | (66.47% identity, 78.04% |
| | | | | | | | | similarity) |
| | | | | | | | | APG06371.0 (66.17% |
| | | | | | | | | identity, 78.04% similarity) |
| | | | | | | | | APG04477.0 (65.98% |
| | | | | | | | | identity, 78.4% similarity) |
| | | | | | | | | APG00563.0 |
| | | | | | | | | US_2016_0355842_A1-127 |
| | | | | | | | | (65.88% identity, 77.45% |
| | | | | | | | | similarity) |
| | | | | | | | | APG00387.0 |
| | | | | | | | | US_2016_0366881_A1-45 |
| | | | | | | | | (55.39% identity, 70.26% |
| | | | | | | | | similarity) |
| | | | | | | | | APG00146.0 |
| | | | | | | | | US_2016_0304898_A1-166 |
| | | | | | | | | (52.77% identity, 65.89% |
| | | | | | | | | similarity) |
| APG04536.0 | 138 | | | | Bin | 90, 91, 92, 93, 94, 95, 96, 97, | 90, 91, 92, 93, 94, | WP_016093722.1 (100.0% |
| | | | | | | 98, 99, 100 | 95, 96, 97, 98, | identity, 100.0% similarity) |
| | | | | | | | 99, 100 | APG06051.0 (86.91% |
| | | | | | | | | identity, 86.91% similarity) |
| | | | | | | | | APG01809.0 (79.67% |
| | | | | | | | | identity, 81.06% similarity) |
| | | | | | | | | APG00215.0 |
| | | | | | | | | US_2016_0311864_A1-78 |
| | | | | | | | | (72.98% identity, 82.45% |
| | | | | | | | | similarity) |
| | | | | | | | | OTW86911.1 (70.72% |
| | | | | | | | | identity, 81.49% similarity) |
| | | | | | | | | APG00880.0 |
| | | | | | | | | US_2016_0366881_A1-134 |
| | | | | | | | | (67.87% identity, 79.22% |
| | | | | | | | | similarity) |
| | | | | | | | | APG00386.0 |
| | | | | | | | | US_2016_0311864_A1-158 |
| | | | | | | | | (62.33% identity, 75.9% |
| | | | | | | | | similarity) |
| | | | | | | | | WP_002167240.1 (60.38% |
| | | | | | | | | identity, 74.39% similarity) |
| | | | | | | | | APG00837.0 (55.1% identity, |
| | | | | | | | | 71.07% similarity) |
| | | | | | | | | WP_002090518.1 (54.14% |
| | | | | | | | | identity, 68.78% similarity) |
| | | | | | | | | WP_048517129.1 (54.14% |
| | | | | | | | | identity, 68.51% similarity) |
| APG04581.0 | 139 | 140 | | | MTX | 90, 91, 92, 93, 94, 95, 96, 97, | 92, 93, 94, 95, 96, | SCY41251.1 (100.0% identity, |
| | | | | | | 98, 99, 100 | 97, 98, 99, 100 | 100.0% similarity) |
| | | | | | | | | WP_051891716.1 (96.58% |
| | | | | | | | | identity, 96.58% similarity) |
| | | | | | | | | EWH35034.1 (86.99% |
| | | | | | | | | identity, 92.81% similarity) |
| | | | | | | | | AAC44125.1 (86.99% identity, |
| | | | | | | | | 92.47% similarity) |
| | | | | | | | | AAC44126.1 (86.64% identity, |
| | | | | | | | | 92.47% similarity) |
| | | | | | | | | AAC44127.1 (86.64% identity, |
| | | | | | | | | 92.47% similarity) |
| | | | | | | | | AAC44120.1 (86.3% identity, |
| | | | | | | | | 92.47% similarity) |
| | | | | | | | | US_8829279_82-38 (85.96% |
| | | | | | | | | identity, 91.78% similarity) |
| | | | | | | | | AAC44105.1 (85.62% identity, |
| | | | | | | | | 91.1% similarity) |
| | | | | | | | | WP_012292821.1 (85.62% |
| | | | | | | | | identity, 90.75% similarity) |
| APG04689.0 | 141 | 142, 143 | | | Cry | 70, 75, 80, 85, 90, 91, 92, 93, | 85, 90, 91, 92, 93, | WP_006919322.1 (99.86% |
| | | | | | | 94, 95, 96, 97, 98, 99, 100 | 94, 95, 96, 97, | identity, 100.0% similarity) |
| | | | | | | | 98, 99, 100 | APG00086.0 |
| | | | | | | | | US_2016_0304898_A1-113 |
| | | | | | | | | (67.91% identity, 81.52% |
| | | | | | | | | similarity) |
| | | | | | | | | WP_006922195.1 (61.57% |
| | | | | | | | | identity, 74.29% similarity) |
| | | | | | | | | APG07751.0 (60.67% identity, |
| | | | | | | | | 73.03% similarity) |
| | | | | | | | | APG00122.0 |
| | | | | | | | | US_2016_0304898_A1-143 |
| | | | | | | | | (59.66% identity, 72.82% |
| | | | | | | | | similarity) |
| | | | | | | | | WP_006927245.1 (34.22% |
| | | | | | | | | identity, 52.01% similarity) |
| | | | | | | | | APG00057.0 |
| | | | | | | | | US_2016_0304898_A1-88 |
| | | | | | | | | (32.93% identity, 47.54% |
| | | | | | | | | similarity) |
| | | | | | | | | WP_081631318.1 (31.16% |
| | | | | | | | | identity, 46.68% similarity) |
| | | | | | | | | APG01135.0 (30.78% identity, |
| | | | | | | | | 45.96% similarity) |
| | | | | | | | | US_8461421_B2-156 (30.49% |
| | | | | | | | | identity, 45.6% similarity) |
| APG04690.0 | 144 | | | | MTX | 45, 50, 55, 60, 65, 70, 75, 80, | 65, 70, 75, 80, 85, | APG01122.0 (92.16% identity, |
| | | | | | | 85, 90, 91, 92, 93, 94, 95, | 90, 91, 92, 93, | 93.73% similarity) |
| | | | | | | 96, 97, 98, 99, 100 | 94, 95, 96, 97, | APG02068.0 (54.35% identity, |
| | | | | | | | 98, 99, 100 | 70.19% similarity) |
| | | | | | | | | APG00360.0 |
| | | | | | | | | US_2016_0355842_A1-69 |
| | | | | | | | | (42.33% identity, 60.74% |
| | | | | | | | | similarity) |
| | | | | | | | | APG05358.0 (39.46% identity, |
| | | | | | | | | 58.43% similarity) |
| | | | | | | | | US_9328356_B2-46 (39.4% |
| | | | | | | | | identity, 57.31% similarity) |
| | | | | | | | | US_9567381_B2-441 (39.4% |
| | | | | | | | | identity, 56.72% similarity) |
| | | | | | | | | APG00907.0 |
| | | | | | | | | US_2016_0311864_A1-225 |
| | | | | | | | | (38.92% identity, 55.99% |
| | | | | | | | | similarity) |
| | | | | | | | | APG01885.0 (38.36% identity, |
| | | | | | | | | 56.6% similarity) |
| | | | | | | | | APG07396.0 (38.3% identity, |
| | | | | | | | | 56.84% similarity) |
| | | | | | | | | APG00332.0 |
| | | | | | | | | US_2016_0355842_A1-64 |
| | | | | | | | | (37.43% identity, 55.39% |
| | | | | | | | | similarity) |
| APG04693.0 | 145 | | | | PIP | 80, 85, 90, 91, 92, 93, 94, 95, | 90, 91, 92, 93, 94, | APG02685.0 (99.27% identity, |
| | | | | | (MTX) | 96, 97, 98, 99, 100 | 95, 96, 97, 98, | 99.27% similarity) |
| | | | | | | | 99, 100 | APG06141.0 (86.13% identity, |
| | | | | | | | | 94.53% similarity) |
| | | | | | | | | CA_2878263-332 (78.83% |
| | | | | | | | | identity, 88.32% similarity) |
| | | | | | | | | APG00659.0 (78.26% |
| | | | | | | | | identity, 84.95% similarity) |
| | | | | | | | | CA_2878263-105 (78.1% |
| | | | | | | | | identity, 89.42% similarity) |
| | | | | | | | | CA_2878263-4 (77.74% |
| | | | | | | | | identity, 88.69% similarity) |
| | | | | | | | | WP_020294695.1 (77.74% |
| | | | | | | | | identity, 88.32% similarity) |
| | | | | | | | | WP_078473056.1 (77.74% |
| | | | | | | | | identity, 88.32% similarity) |
| | | | | | | | | CA_2878263-2 (77.37% |
| | | | | | | | | identity, 88.32% similarity) |
| | | | | | | | | CA_2878263-252 (77.37% |
| | | | | | | | | identity, 88.32% similarity) |
| APG04746.0 | 146 | 147 | | | MTX | 55, 60, 65, 70, 75, 80, 85, 90, | 70, 75, 80, 85, 90, | OTY48309.1 (56.12% identity, |
| | | | | | | 91, 92, 93, 94, 95, 96, 97, | 91, 92, 93, 94, | 69.85% similarity) |
| | | | | | | 98, 99, 100 | 95, 96, 97, 98, | WP_061885189.1 (56.12% |
| | | | | | | | 99, 100 | identity, 69.85% similarity) |
| | | | | | | | | APG00244.0 |
| | | | | | | | | US_2016_0355842_A1-33 |
| | | | | | | | | (50.62% identity, 66.98% |
| | | | | | | | | similarity) |
| | | | | | | | | APG08369.0 (50.45% |
| | | | | | | | | identity, 64.78% similarity) |
| | | | | | | | | APG00509.0 |
| | | | | | | | | US_2016_0355842_A1-113 |
| | | | | | | | | (50.31% identity, 66.36% |
| | | | | | | | | similarity) |
| | | | | | | | | APG00552.0 |
| | | | | | | | | US_2016_0366881_A1-110 |
| | | | | | | | | (50.15% identity, 64.72% |
| | | | | | | | | similarity) |
| | | | | | | | | APG00541.0 |
| | | | | | | | | US_2016_0355842_A1-119 |
| | | | | | | | | (49.69% identity, 67.28% |
| | | | | | | | | similarity) |
| | | | | | | | | APG03701.0 (49.38% identity, |
| | | | | | | | | 65.62% similarity) |
| | | | | | | | | WP_016078640.1 (47.75% |
| | | | | | | | | identity, 65.47% similarity) |
| | | | | | | | | APG00362.0 |
| | | | | | | | | US_2016_0366881_A1-33 |
| | | | | | | | | (46.04% identity, 63.41% |
| | | | | | | | | similarity) |
| APG04750.0 | 148 | | | | MTX | 95, 96, 97, 98, 99, 100 | 97, 98, 99, 100 | APG00323.0 |
| | | | | | | | | US_2016_0355842_A1-60 |
| | | | | | | | | (94.66% identity, 96.14% |
| | | | | | | | | similarity) |
| | | | | | | | | APG00586.0 |
| | | | | | | | | US_2016_0355842_A1-135 |
| | | | | | | | | (92.92% identity, 95.58% |
| | | | | | | | | similarity) |
| | | | | | | | | APG00420.0 |
| | | | | | | | | US_2016_0355842_A1-85 |
| | | | | | | | | (92.65% identity, 94.71% |
| | | | | | | | | similarity) |
| | | | | | | | | APG03324.0 (85.16% |
| | | | | | | | | identity, 88.72% similarity) |
| | | | | | | | | APG03101.0 (70.18% |
| | | | | | | | | identity, 80.72% similarity) |
| | | | | | | | | APG00860.0 |
| | | | | | | | | US_2016_0355842_A1-180 |
| | | | | | | | | (40.72% identity, 58.68% |
| | | | | | | | | similarity) |
| | | | | | | | | APG00718.0 (37.61% |
| | | | | | | | | identity, 57.43% similarity) |
| | | | | | | | | APG04586.0 (35.06% |
| | | | | | | | | identity, 54.02% similarity) |
| | | | | | | | | US_8318900_B2-77 (34.76% |
| | | | | | | | | identity, 54.7% similarity) |
| | | | | | | | | APG09100.0 (32.7% identity, |
| | | | | | | | | 52.86% similarity) |
| APG04781.0 | 149 | 150 | | | MTX | 91, 92, 93, 94, 95, 96, 97, 98, | 93, 94, 95, 96, 97, | US_8318900_B2-75 (90.09% |
| | | | | | | 99, 100 | 98, 99, 100 | identity, 92.71% similarity) |
| | | | | | | | | US_8318900_B2-76 (84.55% |
| | | | | | | | | identity, 90.09% similarity) |
| | | | | | | | | APG00505.0 |
| | | | | | | | | US_2016_0366881_A1-101 |
| | | | | | | | | (77.55% identity, 84.26% |
| | | | | | | | | similarity) |
| | | | | | | | | OUB07573.1 (77.55% |
| | | | | | | | | identity, 84.26% similarity) |
| | | | | | | | | APG03543.0 (76.97% identity, |
| | | | | | | | | 84.26% similarity) |
| | | | | | | | | APG00339.0 |
| | | | | | | | | US_2016_0355842_A1-65 |
| | | | | | | | | (65.52% identity, 75.29% |
| | | | | | | | | similarity) |
| | | | | | | | | APG00858.0 (64.76% identity, |
| | | | | | | | | 74.21% similarity) |
| | | | | | | | | APG08693.0 (41.35% |
| | | | | | | | | identity, 51.89% similarity) |
| | | | | | | | | OUB07579.1 (41.35% |
| | | | | | | | | identity, 51.89% similarity) |
| | | | | | | | | OUB27300.1 (35.39% |
| | | | | | | | | identity, 52.25% similarity) |
| APG04789.0 | 151 | 152 | | | MTX | 90, 91, 92, 93, 94, 95, 96, 97, | 94, 95, 96, 97, 98, | WP_000163136.1 (100.0% |
| | | | | | | 98, 99, 100 | 99, 100 | identity, 100.0% similarity) |
| | | | | | | | | WP_001036192.1 (89.44% |
| | | | | | | | | identity, 95.05% similarity) |
| | | | | | | | | WP_065212007.1 (87.46% |
| | | | | | | | | identity, 93.73% similarity) |
| | | | | | | | | OTY00842.1 (87.13% identity, |
| | | | | | | | | 93.4% similarity) |
| | | | | | | | | WP_050822474.1 (86.14% |
| | | | | | | | | identity, 93.07% similarity) |
| | | | | | | | | APG00013.0 |
| | | | | | | | | US_2016_0304898_A1-22 |
| | | | | | | | | (85.81% identity, 93.07% |
| | | | | | | | | similarity) |
| | | | | | | | | WP_044797732.1 (80.53% |
| | | | | | | | | identity, 89.44% similarity) |
| | | | | | | | | WP_044795674.1 (79.21% |
| | | | | | | | | identity, 88.78% similarity) |
| | | | | | | | | SFM27417.1 (62.26% |
| | | | | | | | | identity, 78.39% similarity) |
| | | | | | | | | WP_065211994.1 (61.69% |
| | | | | | | | | identity, 76.95% similarity) |
| APG04812.0 | 153 | 154 | | | MTX | 40, 45, 50, 55, 60, 65, 70, 75, | 60, 65, 70, 75, 80, | APG01488.0 (36.89% |
| | | | | | | 80, 85, 90, 91, 92, 93, 94, | 85, 90, 91, 92, | identity, 55.33% similarity) |
| | | | | | | 95, 96, 97, 98, 99, 100 | 93, 94, 95, 96, | APG00686.0 |
| | | | | | | | 97, 98, 99, 100 | US_2016_0355842_A1-159 |
| | | | | | | | | (36.6% identity, 56.2% |
| | | | | | | | | similarity) |
| | | | | | | | | APG04345.0 (36.21% |
| | | | | | | | | identity, 56.03% similarity) |
| | | | | | | | | APG00860.0 |
| | | | | | | | | US_2016_0355842_A1-180 |
| | | | | | | | | (30.61% identity, 47.81% |
| | | | | | | | | similarity) |
| | | | | | | | | APG04750.0 (29.09% identity, |
| | | | | | | | | 45.98% similarity) |
| | | | | | | | | APG03324.0 (29.08% |
| | | | | | | | | identity, 45.65% similarity) |
| | | | | | | | | US_8318900_B2-77 (28.77% |
| | | | | | | | | identity, 44.11% similarity) |
| | | | | | | | | APG00586.0 |
| | | | | | | | | US_2016_0355842_A1-135 |
| | | | | | | | | (28.42% identity, 45.08% |
| | | | | | | | | similarity) |
| | | | | | | | | APG00420.0 |
| | | | | | | | | US_2016_0355842_A1-85 |
| | | | | | | | | (28.42% identity, 44.81% |
| | | | | | | | | similarity) |
| | | | | | | | | APG00425.0 |
| | | | | | | | | US_2016_0355842_A1-87 |
| | | | | | | | | (28.37% identity, 44.63% |
| | | | | | | | | similarity) |
| APG04827.0 | 155 | | | | Cry | 80, 85, 90, 91, 92, 93, 94, 95, | 85, 90, 91, 92, 93, | US_7919272_B2-13 (77.23% |
| | | | | | | 96, 97, 98, 99, 100 | 94, 95, 96, 97, | identity, 83.52% similarity) |
| | | | | | | | 98, 99, 100 | CA_2753918-13 (77.05% |
| | | | | | | | | identity, 83.32% similarity) |
| | | | | | | | | APG00786.0 (76.23% |
| | | | | | | | | identity, 81.75% similarity) |
| | | | | | | | | APG00662.0 (70.1% identity, |
| | | | | | | | | 78.31% similarity) |
| | | | | | | | | US_7919272_B2-23 (69.99% |
| | | | | | | | | identity, 78.13% similarity) |
| | | | | | | | | APG00079.0 |
| | | | | | | | | US_2016_0177333_A1-43 |
| | | | | | | | | (67.49% identity, 76.1% |
| | | | | | | | | similarity) |
| | | | | | | | | WP_016084057.1 (66.32% |
| | | | | | | | | identity, 76.94% similarity) |
| | | | | | | | | WP_016084447.1 (66.32% |
| | | | | | | | | identity, 76.94% similarity) |
| | | | | | | | | WP_016085042.1 (66.32% |
| | | | | | | | | identity, 76.94% similarity) |
| | | | | | | | | WP_014990471.1 (63.51% |
| | | | | | | | | identity, 74.0% similarity) |
| APG04832.0 | 156 | 157 | | | Bin | 92, 93, 94, 95, 96, 97, 98, 99, | 97, 98, 99, 100 | WP_000143308.1 (97.86% |
| | | | | | | 100 | | identity, 98.39% similarity) |
| | | | | | | | | APG00731.0 |
| | | | | | | | | US_2016_0311864_A1-211 |
| | | | | | | | | (91.15% identity, 96.51% |
| | | | | | | | | similarity) |
| | | | | | | | | WP_000143307.1 (91.15% |
| | | | | | | | | identity, 95.17% similarity) |
| | | | | | | | | APG00284.0 |
| | | | | | | | | US_2016_0311864_A1-117 |
| | | | | | | | | (90.62% identity, 94.91% |
| | | | | | | | | similarity) |
| | | | | | | | | APG02742.0 (89.01% |
| | | | | | | | | identity, 94.64% similarity) |
| | | | | | | | | APG00035.0 |
| | | | | | | | | US_2016_0304898_A1-58 |
| | | | | | | | | (88.74% identity, 95.71% |
| | | | | | | | | similarity) |
| | | | | | | | | APG00494.0 (86.86% |
| | | | | | | | | identity, 92.49% similarity) |
| | | | | | | | | APG00669.0 |
| | | | | | | | | US_2016_0355842_A1-156 |
| | | | | | | | | (86.6% identity, 93.3% |
| | | | | | | | | similarity) |
| | | | | | | | | APG00231.0 |
| | | | | | | | | US_2016_0311864_A1-86 |
| | | | | | | | | (86.06% identity, 92.23% |
| | | | | | | | | similarity) |
| | | | | | | | | APG00568.0 |
| | | | | | | | | US_2016_0311864_A1-391 |
| | | | | | | | | (85.79% identity, 92.76% |
| | | | | | | | | similarity) |
| | | | | | | | | APG00377.0 |
| | | | | | | | | US_2016_0311864_A1-154 |
| | | | | | | | | (85.79% identity, 91.42% |
| | | | | | | | | similarity) |
| APG04865.0 | 158 | 159 | | | MTX | 94, 95, 96, 97, 98, 99, 100 | 97, 98, 99, 100 | APG00488.0 |
| | | | | | | | | US_2016_0355842_A1-108 |
| | | | | | | | | (93.79% identity, 96.42% |
| | | | | | | | | similarity) |
| | | | | | | | | WP_078188020.1 (56.19% |
| | | | | | | | | identity, 56.43% similarity) |
| | | | | | | | | CA_2844913-106 (40.48% |
| | | | | | | | | identity, 59.52% similarity) |
| | | | | | | | | APG07034.0 (40.09% identity, |
| | | | | | | | | 58.49% similarity) |
| | | | | | | | | APG00311.0 |
| | | | | | | | | US_2016_0366881_A1-6 |
| | | | | | | | | (35.44% identity, 52.14% |
| | | | | | | | | similarity) |
| | | | | | | | | OUB06458.1 (35.44% |
| | | | | | | | | identity, 52.14% similarity) |
| | | | | | | | | WP_078188021.1 (35.32% |
| | | | | | | | | identity, 35.56% similarity) |
| | | | | | | | | APG03192.0 (35.21% identity, |
| | | | | | | | | 53.27% similarity) |
| APG04953.0 | 160 | | | | Cry | 5, 10, 15, 20, 25, 30, 35, 40, | 5, 10, 15, 20, 25, | WP_081730446.1 (39.46% |
| | | | | | | 45, 50, 55, 60, 65, 70, 75, 80, | 30, 35, 40, 45, | identity, 58.46% similarity) |
| | | | | | | 85, 90, 91, 92, 93, 94, 95, | 50, 55, 60, 65, 70, | WP_072068146.1 (26.8% |
| | | | | | | 96, 97, 98, 99, 100 | 75, 80, 85, 90, | identity, 44.4% similarity) |
| | | | | | | | 91, 92, 93, 94, | WP_072063966.1 (26.26% |
| | | | | | | | 95, 96, 97, 98, 99, | identity, 44.65% similarity) |
| | | | | | | | 100 | EEG83184.1 (26.19% identity, |
| | | | | | | | | 44.25% similarity) |
| APG05040.0 | 161 | | | | MTX | 50, 55, 60, 65, 70, 75, 80, 85, | 65, 70, 75, 80, 85, | APG02970.0 (89.67% identity, |
| | | | | | | 90, 91, 92, 93, 94, 95, 96, | 90, 91, 92, 93, | 95.14% similarity) |
| | | | | | | 97, 98, 99, 100 | 94, 95, 96, 97, | APG02808.0 (87.99% identity, |
| | | | | | | | 98, 99, 100 | 93.09% similarity) |
| | | | | | | | | APG01367.0 (82.53% identity, |
| | | | | | | | | 90.66% similarity) |
| | | | | | | | | APG00793.0 |
| | | | | | | | | US_2016_0355842_A1-170 |
| | | | | | | | | (45.98% identity, 63.51% |
| | | | | | | | | similarity) |
| | | | | | | | | APG00416.0 |
| | | | | | | | | US_2016_0355842_A1-82 |
| | | | | | | | | (41.14% identity, 57.14% |
| | | | | | | | | similarity) |
| | | | | | | | | APG09460.0 (40.91% |
| | | | | | | | | identity, 57.1% similarity) |
| | | | | | | | | WP_072335847.1 (40.4% |
| | | | | | | | | identity, 55.37% similarity) |
| | | | | | | | | US_8829279_B2-11 (40.22% |
| | | | | | | | | identity, 58.1% similarity) |
| | | | | | | | | APG05956.0 (39.71% |
| | | | | | | | | identity, 56.29% similarity) |
| | | | | | | | | SDZ23421.1 (37.98% identity, |
| | | | | | | | | 56.97% similarity) |
| APG05056.0 | 162 | | | | Cry | 40, 45, 50, 55, 60, 65, 70, 75, | 50, 55, 60, 65, 70, | APG00057.0 |
| | | | | | | 80, 85, 90, 91, 92, 93, 94, | 75, 80, 85, 90, | US_2016_0304898_A1-88 |
| | | | | | | 95, 96, 97, 98, 99, 100 | 91, 92, 93, 94, | (35.58% identity, 49.82% |
| | | | | | | | 95, 96, 97, 98, 99, | similarity) |
| | | | | | | | 100 | WP_006927245.1 (35.53% |
| | | | | | | | | identity, 49.4% similarity) |
| | | | | | | | | APG01261.0 (34.77% identity, |
| | | | | | | | | 51.28% similarity) |
| | | | | | | | | WP_006925513.1 (34.77% |
| | | | | | | | | identity, 51.28% similarity) |
| | | | | | | | | WP_006922195.1 (30.2% |
| | | | | | | | | identity, 45.61% similarity) |
| | | | | | | | | APG07751.0 (29.77% identity, |
| | | | | | | | | 44.96% similarity) |
| | | | | | | | | APG00122.0 |
| | | | | | | | | US_2016_0304898_A1-143 |
| | | | | | | | | (29.76% identity, 45.24% |
| | | | | | | | | similarity) |
| | | | | | | | | APG00086.0 |
| | | | | | | | | US_2016_0304898_A1-113 |
| | | | | | | | | (29.68% identity, 44.46% |
| | | | | | | | | similarity) |
| | | | | | | | | APG04689.0 (29.56% identity, |
| | | | | | | | | 44.7% similarity) |
| | | | | | | | | WP_006919322.1 (29.56% |
| | | | | | | | | identity, 44.7% similarity) |
| APG05082.0 | 163 | | | | Cry | 65, 70, 75, 80, 85, 90, 91, 92, | 75, 80, 85, 90, 91, | APG00125.0 |
| | | | | | | 93, 94, 95, 96, 97, 98, 99, | 92, 93, 94, 95, | US_2016_0304898_A1-151 |
| | | | | | | 100 | 96, 97, 98, 99, | (61.21% identity, 74.39% |
| | | | | | | | 100 | similarity) |
| | | | | | | | | APG00389.0 |
| | | | | | | | | US_2016_0366881_A1-46 |
| | | | | | | | | (56.77% identity, 65.85% |
| | | | | | | | | similarity) |
| | | | | | | | | APG00040.0 |
| | | | | | | | | US_2016_0304898_A1-62 |
| | | | | | | | | (53.5% identity, 66.03% |
| | | | | | | | | similarity) |
| | | | | | | | | APG00169.0 |
| | | | | | | | | US_2016_0304898_A1-181 |
| | | | | | | | | (46.1% identity, 59.97% |
| | | | | | | | | similarity) |
| | | | | | | | | APG00133.0 |
| | | | | | | | | US_2016_0304898_A1-160 |
| | | | | | | | | (43.08% identity, 59.08% |
| | | | | | | | | similarity) |
| | | | | | | | | APG00582.0 |
| | | | | | | | | US_2016_0366881_A1-112 |
| | | | | | | | | (41.35% identity, 55.08% |
| | | | | | | | | similarity) |
| | | | | | | | | APG00028.0 |
| | | | | | | | | US_2016_0304898_A1-47 |
| | | | | | | | | (36.67% identity, 49.27% |
| | | | | | | | | similarity) |
| | | | | | | | | APG08430.0 (36.12% |
| | | | | | | | | identity, 52.83% similarity) |
| | | | | | | | | BAE79727.1 (31.83% identity, |
| | | | | | | | | 47.54% similarity) |
| | | | | | | | | US_2016_0345590_A1-2 |
| | | | | | | | | (31.66% identity, 47.28% |
| | | | | | | | | similarity) |
| APG05139.0 | 164 | 165 | | | Cry | 90, 91, 92, 93, 94, 95, 96, 97, | 93, 94, 95, 96, 97, | US_8318900_B2-90 (87.8% |
| | | | | | | 98, 99, 100 | 98, 99, 100 | identity, 2.68% similarity) |
| | | | | | | | | APG01679.0 (40.39% identity, |
| | | | | | | | | 54.28% similarity) |
| | | | | | | | | WP_048536362.1 (40.39% |
| | | | | | | | | identity, 54.28% similarity) |
| | | | | | | | | APG06997.0 (38.55% |
| | | | | | | | | identity, 56.84% similarity) |
| | | | | | | | | APG00435.0 |
| | | | | | | | | US_2016_0366881_A1-59 |
| | | | | | | | | (37.07% identity, 53.01% |
| | | | | | | | | similarity) |
| | | | | | | | | OTX35223.1 (37.07% identity, |
| | | | | | | | | 53.01% similarity) |
| | | | | | | | | APG07224.0 (35.43% |
| | | | | | | | | identity, 51.85% similarity) |
| | | | | | | | | APG00313.0 |
| | | | | | | | | US_2016_0366881_A1-8 |
| | | | | | | | | (34.85% identity, 51.18% |
| | | | | | | | | similarity) |
| | | | | | | | | OTX35247.1 (34.85% identity, |
| | | | | | | | | 51.18% similarity) |
| | | | | | | | | APG00787.0 (34.2% identity, |
| | | | | | | | | 47.18% similarity) |
| APG05228.0 | 166 | | | | Cry | 40, 45, 50, 55, 60, 65, 70, 75, | 55, 60, 65, 70, 75, | WP_061139797.1 (62.87% |
| | | | | | | 80, 85, 90, 91, 92, 93, 94, | 80, 85, 90, 91, | identity, 70.59% similarity) |
| | | | | | | 95, 96, 97, 98, 99, 100 | 92, 93, 94, 95, | APG00787.0 (38.33% |
| | | | | | | | 96, 97, 98, 99, 100 | identity, 52.33% similarity) |
| | | | | | | | | APG00232.0 |
| | | | | | | | | US_2016_0311864_A1-87 |
| | | | | | | | | (36.3% identity, 45.78% |
| | | | | | | | | similarity) |
| | | | | | | | | APG00471.0 |
| | | | | | | | | US_2016_0366881_A1-85 |
| | | | | | | | | (36.27% identity, 45.83% |
| | | | | | | | | similarity) |
| | | | | | | | | KXH80331.1 (34.51% identity, |
| | | | | | | | | 46.22% similarity) |
| | | | | | | | | WP_082770008.1 (33.48% |
| | | | | | | | | identity, 44.84% similarity) |
| | | | | | | | | APG05439.0 (30.22% identity, |
| | | | | | | | | 46.58% similarity) |
| | | | | | | | | APG09630.0 (28.99% |
| | | | | | | | | identity, 41.42% similarity) |
| | | | | | | | | APG00723.0 |
| | | | | | | | | US_2016_0311864_A1-209 |
| | | | | | | | | (28.74% identity, 41.62% |
| | | | | | | | | similarity) |
| | | | | | | | | APG00603.0 |
| | | | | | | | | US_2016_0311864_A1-198 |
| | | | | | | | | (26.36% identity, 40.91% |
| | | | | | | | | similarity) |
| APG05252.0 | 167 | | | | MTX | 30, 35, 40, 45, 50, 55, 60, 65, | 40, 45, 50, 55, 60, | APG03638.0 (27.17% identity, |
| | | | | | | 70, 75, 80, 85, 90, 91, 92, | 65, 70, 75, 80, | 39.5% similarity) |
| | | | | | | 93, 94, 95, 96, 97, 98, 99, 100 | 85, 90, 91, 92, | OOR71217.1 (27.17% |
| | | | | | | | 93, 94, 95, 96, 97, | identity, 39.5% similarity) |
| | | | | | | | 98, 99, 100 | APG08605.0 (26.89% identity, |
| | | | | | | | | 39.5% similarity) |
| | | | | | | | | ANS51624.1 (26.4% identity, |
| | | | | | | | | 38.76% similarity) |
| | | | | | | | | ANS52378.1 (26.4% identity, |
| | | | | | | | | 38.76% similarity) |
| | | | | | | | | APG00228.0 |
| | | | | | | | | US_2016_0355842_A1-31 |
| | | | | | | | | (25.88% identity, 38.44% |
| | | | | | | | | similarity) |
| APG05255.0 | 168 | 169 | | | Bin | 90, 91, 92, 93, 94, 95, 96, 97, | 96, 97, 98, 99, 100 | APG00392.0 |
| | | | | | | 98, 99, 100 | | US_2016_0311864_A1-161 |
| | | | | | | | | (87.94% identity, 95.23% |
| | | | | | | | | similarity) |
| | | | | | | | | APG00308.0 |
| | | | | | | | | US_2016_0311864_A1-135 |
| | | | | | | | | (86.18% identity, 92.21% |
| | | | | | | | | similarity) |
| | | | | | | | | APG00767.0 |
| | | | | | | | | US_2016_0311864_A1-216 |
| | | | | | | | | (80.92% identity, 88.41% |
| | | | | | | | | similarity) |
| | | | | | | | | APG00407.0 |
| | | | | | | | | US_2016_0311864_A1-170 |
| | | | | | | | | (79.65% identity, 88.34% |
| | | | | | | | | similarity) |
| | | | | | | | | APG00385.0 |
| | | | | | | | | US_2016_0311864_A1-157 |
| | | | | | | | | (76.38% identity, 88.44% |
| | | | | | | | | similarity) |
| | | | | | | | | APG00724.0 (73.84% |
| | | | | | | | | identity, 84.11% similarity) |
| | | | | | | | | APG00806.0 (73.07% |
| | | | | | | | | identity, 83.29% similarity) |
| | | | | | | | | APG00132.0 |
| | | | | | | | | US_2016_0311864_A1-31 |
| | | | | | | | | (72.1% identity, 82.96% |
| | | | | | | | | similarity) |
| | | | | | | | | APG00709.0 (71.67% identity, |
| | | | | | | | | 81.77% similarity) |
| | | | | | | | | APG09977.0 (71.61% |
| | | | | | | | | identity, 82.16% similarity) |
| APG05307.0 | 170 | 171 | | | MTX | 50, 55, 60, 65, 70, 75, 80, 85, | 60, 65, 70, 75, 80, | OLR27590.1 (83.82% identity, |
| | | | | | | 90, 91, 92, 93, 94, 95, 96, | 85, 90, 91, 92, | 88.15% similarity) |
| | | | | | | 97, 98, 99, 100 | 93, 94, 95, 96, | OLR23791.1 (80.52% identity, |
| | | | | | | | 97, 98, 99, 100 | 86.92% similarity) |
| | | | | | | | | ANS51604.1 (48.61% identity, |
| | | | | | | | | 59.72% similarity) |
| | | | | | | | | US_2016_0017363_A1-59 |
| | | | | | | | | (48.07% identity, 59.39% |
| | | | | | | | | similarity) |
| | | | | | | | | WP_078401252.1 (47.91% |
| | | | | | | | | identity, 63.51% similarity) |
| | | | | | | | | US_2016_0017363_A1-60 |
| | | | | | | | | (47.22% identity, 58.06% |
| | | | | | | | | similarity) |
| | | | | | | | | US_2016_0017363_A1-61 |
| | | | | | | | | (46.39% identity, 56.94% |
| | | | | | | | | similarity) |
| | | | | | | | | US_2016_0017363_A1-63 |
| | | | | | | | | (46.18% identity, 56.37% |
| | | | | | | | | similarity) |
| | | | | | | | | WP_023524027.1 (45.5% |
| | | | | | | | | identity, 56.95% similarity) |
| | | | | | | | | WP_043924590.1 (45.0% |
| | | | | | | | | identity, 54.47% similarity) |
| APG05338.0 | 172 | 173 | | | MTX | 75, 80, 85, 90, 91, 92, 93, 94, | 85, 90, 91, 92, 93, | WP_014481533.1 (100.0% |
| | | | | | | 95, 96, 97, 98, 99, 100 | 94, 95, 96, 97, | identity, 100.0% similarity) |
| | | | | | | | 98, 99, 100 | APG02809.0 (70.15% |
| | | | | | | | | identity, 80.22% similarity) |
| | | | | | | | | APG02740.0 (28.62% |
| | | | | | | | | identity, 44.48% similarity) |
| | | | | | | | | US_5308760_A-9 (25.88% |
| | | | | | | | | identity, 43.45% similarity) |
| APG05358.0 | 174 | | | | MTX | 45, 50, 55, 60, 65, 70, 75, 80, | 60, 65, 70, 75, 80, | APG00360.0 |
| | | | | | | 85, 90, 91, 92, 93, 94, 95, | 85, 90, 91, 92, | US_2016_0355842_A1-69 |
| | | | | | | 96, 97, 98, 99, 100 | 93, 94, 95, 96, | (44.31% identity, 56.29% |
| | | | | | | | 97, 98, 99, 100 | similarity) |
| | | | | | | | | APG00332.0 |
| | | | | | | | | US_2016_0355842_A1-64 |
| | | | | | | | | (42.59% identity, 58.02% |
| | | | | | | | | similarity) |
| | | | | | | | | APG02068.0 (42.55% identity, |
| | | | | | | | | 60.18% similarity) |
| | | | | | | | | APG00907.0 |
| | | | | | | | | US_2016_0311864_A1-225 |
| | | | | | | | | (41.59% identity, 57.49% |
| | | | | | | | | similarity) |
| | | | | | | | | APG07396.0 (40.35% |
| | | | | | | | | identity, 53.8% similarity) |
| | | | | | | | | APG00112.0 |
| | | | | | | | | US_2016_0311864_A1-23 |
| | | | | | | | | (40.25% identity, 57.59% |
| | | | | | | | | similarity) |
| | | | | | | | | US_8318900_B2-191 (39.94% |
| | | | | | | | | identity, 55.49% similarity) |
| | | | | | | | | APG04690.0 (39.46% identity, |
| | | | | | | | | 58.43% similarity) |
| | | | | | | | | US_9328356_B2-46 (39.05% |
| | | | | | | | | identity, 55.33% similarity) |
| | | | | | | | | US_9567381_B2-441 (39.05% |
| | | | | | | | | identity, 55.03% similarity) |
| APG05385.0 | 175 | 176, 177 | | | MTX | 50, 55, 60, 65, 70, 75, 80, 85, | 70, 75, 80, 85, 90, | APG05653.0 (47.88% |
| | | | | | | 90, 91, 92, 93, 94, 95, 96, | 91, 92, 93, 94, | identity, 67.14% similarity) |
| | | | | | | 97, 98, 99, 100 | 95, 96, 97, 98, | OUB29186.1 (42.7% identity, |
| | | | | | | | 99, 100 | 58.99% similarity) |
| | | | | | | | | APG06364.0 (41.48% |
| | | | | | | | | identity, 58.52% similarity) |
| | | | | | | | | SDW45494.1 (40.86% |
| | | | | | | | | identity, 58.87% similarity) |
| | | | | | | | | APG08817.0 (37.67% |
| | | | | | | | | identity, 54.2% similarity) |
| | | | | | | | | WP_075716648.1 (36.86% |
| | | | | | | | | identity, 55.56% similarity) |
| | | | | | | | | APG02187.0 (36.69% identity, |
| | | | | | | | | 56.33% similarity) |
| | | | | | | | | WP_075716659.1 (36.55% |
| | | | | | | | | identity, 56.66% similarity) |
| | | | | | | | | WP_016099382.1 (36.42% |
| | | | | | | | | identity, 52.31% similarity) |
| | | | | | | | | SDW71198.1 (36.34% |
| | | | | | | | | identity, 54.92% similarity) |
| APG05424.0 | 178 | 179 | | | Cry | 65, 70, 75, 80, 85, 90, 91, 92, | 80, 85, 90, 91, 92, | APG01313.0 (69.11% identity, |
| | | | | | | 93, 94, 95, 96, 97, 98, 99, | 93, 94, 95, 96 | 80.68% similarity) |
| | | | | | | 100 | 97, 98, 99, 100 | US_8461415_B2-14 (64.71% |
| | | | | | | | | identity, 79.26% similarity) |
| | | | | | | | | US_8461415_B2-42 (64.6% |
| | | | | | | | | identity, 79.26% similarity) |
| | | | | | | | | APG00096.0 |
| | | | | | | | | US_2016_0304898_A1-125 |
| | | | | | | | | (64.57% identity, 78.58% |
| | | | | | | | | similarity) |
| | | | | | | | | APG00114.0 |
| | | | | | | | | US_2016_0177333_A1-64 |
| | | | | | | | | (61.62% identity, 77.9% |
| | | | | | | | | similarity) |
| | | | | | | | | APG00030.0 |
| | | | | | | | | US_2016_0304898_A1-50 |
| | | | | | | | | (61.38% identity, 78.37% |
| | | | | | | | | similarity) |
| | | | | | | | | APG00113.0 |
| | | | | | | | | US_2016_0311864_A1-24 |
| | | | | | | | | (57.63% identity, 74.02% |
| | | | | | | | | similarity) |
| | | | | | | | | APG00196.0 |
| | | | | | | | | US_2016_0311864_A1-66 |
| | | | | | | | | (55.77% identity, 72.47% |
| | | | | | | | | similarity) |
| | | | | | | | | WP_081097654.1 (53.96% |
| | | | | | | | | identity, 71.74% similarity) |
| | | | | | | | | APG00452.0 |
| | | | | | | | | US_2016_0366881_A1-73 |
| | | | | | | | | (52.83% identity, 70.61% |
| | | | | | | | | similarity) |
| APG05439.0 | 180 | 181 | | | Cry | 65, 70, 75, 80, 85, 90, 91, 92, | 75, 80, 85, 90, 91, | APG09630.0 (63.15% |
| | | | | | | 93, 94, 95, 96, 97, 98, 99, | 92, 93, 94, 95, | identity, 74.46% similarity) |
| | | | | | | 100 | 96, 97, 98, 99, | APG00723.0 |
| | | | | | | | 100 | US_2016_0311864_A1-209 |
| | | | | | | | | (62.63% identity, 73.51% |
| | | | | | | | | similarity) |
| | | | | | | | | APG00787.0 (47.67% |
| | | | | | | | | identity, 62.6% similarity) |
| | | | | | | | | WP_082770008.1 (43.45% |
| | | | | | | | | identity, 56.26% similarity) |
| | | | | | | | | KXH80331.1 (43.01% identity, |
| | | | | | | | | 55.8% similarity) |
| | | | | | | | | APG00471.0 |
| | | | | | | | | US_2016_0366881_A1-85 |
| | | | | | | | | (37.48% identity, 51.42% |
| | | | | | | | | similarity) |
| | | | | | | | | APG01679.0 (34.1% identity, |
| | | | | | | | | 47.09% similarity) |
| | | | | | | | | WP_048536362.1 (34.1% |
| | | | | | | | | identity, 47.09% similarity) |
| | | | | | | | | APG09441.0 (33.95% |
| | | | | | | | | identity, 45.31% similarity) |
| | | | | | | | | APG00232.0 |
| | | | | | | | | US_2016_0311864_A1-87 |
| | | | | | | | | (33.65% identity, 45.0% |
| | | | | | | | | similarity) |
| APG05445.0 | 182 | | | | MTX | 5, 10, 15, 20, 25, 30, 35, 40, | 5, 10, 15, 20, 25, | |
| | | | | | | 45, 50, 55, 60, 65, 70, 75, 80, | 30, 35, 40, 45, | |
| | | | | | | 85, 90, 91, 92, 93, 94, 95, | 50, 55, 60, 65, 70, | |
| | | | | | | 96, 97, 98, 99, 100 | 75, 80, 85, 90, | |
| | | | | | | | 91, 92, 93, 94, | |
| | | | | | | | 95, 96, 97, 98, 99, | |
| | | | | | | | 100 | |
| APG05468.0 | 183 | 184 | | | MTX | 95, 96, 97, 98, 99, 100 | 98, 99, 100 | APG00825.0 |
| | | | | | | | | US_2016_0355842_A1-174 |
| | | | | | | | | (94.06% identity, 97.36% |
| | | | | | | | | similarity) |
| | | | | | | | | APG00272.0 |
| | | | | | | | | US_2016_0304898_A1-210 |
| | | | | | | | | (76.82% identity, 88.74% |
| | | | | | | | | similarity) |
| | | | | | | | | APG00019.0 |
| | | | | | | | | US_2016_0304898_A1-31 |
| | | | | | | | | (63.64% identity, 73.7% |
| | | | | | | | | similarity) |
| | | | | | | | | WP_080674340.1 (44.37% |
| | | | | | | | | identity, 59.27% similarity) |
| | | | | | | | | WP_048593204.1 (41.25% |
| | | | | | | | | identity, 59.74% similarity) |
| | | | | | | | | WP_051388441.1 (40.91% |
| | | | | | | | | identity, 60.71% similarity) |
| | | | | | | | | APG06560.0 (35.45% |
| | | | | | | | | identity, 50.91% similarity) |
| | | | | | | | | OTY49008.1 (35.37% identity, |
| | | | | | | | | 54.88% similarity) |
| | | | | | | | | WP_001039209.1 (35.37% |
| | | | | | | | | identity, 54.57% similarity) |
| | | | | | | | | APG00851.0 |
| | | | | | | | | US_2016_0311864_A1-222 |
| | | | | | | | | (35.03% identity, 51.5% |
| | | | | | | | | similarity) |
| | | | | | | | | OUB29113.1 (35.03% |
| | | | | | | | | identity, 51.5% similarity) |
| | | | | | | | | WP_061663532.1 (35.03% |
| | | | | | | | | identity, 51.5% similarity) |
| APG05519.0 | 185 | 186 | | | Cry | 30, 35, 40, 45, 50, 55, 60, 65, | 45, 50, 55, 60, 65, | WP_015892933.1 (96.1% |
| | | | | | | 70, 75, 80, 85, 90, 91, 92, | 70, 75, 80, 85, | identity, 98.05% similarity) |
| | | | | | | 93, 94, 95, 96, 97, 98, 99, 100 | 90, 91, 92, 93, | WP_069848556.1 (93.9% |
| | | | | | | | 94, 95, 96, 97, 98, | identity, 96.12% similarity) |
| | | | | | | | 99, 100 | WP_017251277.1 (93.2% |
| | | | | | | | | identity, 95.7% similarity) |
| | | | | | | | | WP_016742208.1 (91.26% |
| | | | | | | | | identity, 94.45% similarity) |
| | | | | | | | | APG00182.0 |
| | | | | | | | | US_2016_0355842_A1-17 |
| | | | | | | | | (27.73% identity, 40.4% |
| | | | | | | | | similarity) |
| | | | | | | | | CUB55361.1 (27.48% identity, |
| | | | | | | | | 39.62% similarity) |
| | | | | | | | | APG05711.0 (27.43% |
| | | | | | | | | identity, 41.7% similarity) |
| | | | | | | | | WP_078401802.1 (26.6% |
| | | | | | | | | identity, 40.15% similarity) |
| | | | | | | | | APG00097.0 |
| | | | | | | | | US_2016_0177333_A1-53 |
| | | | | | | | | (26.26% identity, 40.11% |
| | | | | | | | | similarity) |
| | | | | | | | | APG00383.0 (25.99% |
| | | | | | | | | identity, 40.09% similarity) |
| APG05563.0 | 187 | 188 | | | Cry34 | 5, 10, 15, 20, 25, 30, 35, 40, | 5, 10, 15, 20, 25 | WP_078404250.1 (98.02% |
| | | | | | | 45, 50, 55, 60, 65, 70, 75, 80, | 30, 35, 40, 45, | identity, 99.26% similarity) |
| | | | | | | 85, 90, 91, 92, 93, 94, 95, | 50, 55, 60, 65, 70, | WP_051395691.1 (74.94% |
| | | | | | | 96, 97, 98, 99, 100 | 75, 80, 85, 90, | identity, 84.03% similarity) |
| | | | | | | | 91, 92, 93, 94, | |
| | | | | | | | 95, 96, 97, 98, 99, | |
| | | | | | | | 100 | |
| APG05590.0 | 189 | | | | Cry | 60, 65, 70, 75, 80, 85, 90, 91, | 75, 80, 85, 90, 91, | US_9567381_B2-1420 (58.9% |
| | | | | | | 92, 93, 94, 95, 96, 97, 98, | 92, 93, 94, 95, | identity, 71.36% similarity) |
| | | | | | | 99, 100 | 96, 97, 98, 99, | WP_061328170.1 (27.67% |
| | | | | | | | 100 | identity, 43.56% similarity) |
| | | | | | | | | 4MOA_A (25.94% identity, |
| | | | | | | | | 42.3% similarity) |
| | | | | | | | | APG00133.0 |
| | | | | | | | | US_2016_0304898_A1-160 |
| | | | | | | | | (25.36% identity, 38.88% |
| | | | | | | | | similarity) |
| | | | | | | | | KIQ78153.1 (25.29% identity, |
| | | | | | | | | 41.46% similarity) |
| | | | | | | | | US_8318900_B2-149 (25.28% |
| | | | | | | | | identity, 37.24% similarity) |
| | | | | | | | | US_9567381_B2-415 (25.26% |
| | | | | | | | | identity, 39.92% similarity) |
| | | | | | | | | US_9567381_B2-416 (25.26% |
| | | | | | | | | identity, 39.79% similarity) |
| | | | | | | | | APG00169.0 |
| | | | | | | | | US_2016_0304898_A1-181 |
| | | | | | | | | (25.26% identity, 38.6% |
| | | | | | | | | similarity) |
| | | | | | | | | APG00125.0 |
| | | | | | | | | US_2016_0304898_A1-151 |
| | | | | | | | | (25.17% identity, 39.01% |
| | | | | | | | | similarity) |
| APG05632.0 | 190 | 191, 192 | | | Cry22 | 50, 55, 60, 65, 70, 75, 80, 85, | 65, 70, 75, 80, 85, | OJG52895.1 (99.4% identity, |
| | | | | | | 90, 91, 92, 93, 94, 95, 96, | 90, 91, 92, 93, | 99.8% similarity) |
| | | | | | | 97, 98, 99, 100 | 94, 95, 96, 97, | WP_010738062.1 (98.19% |
| | | | | | | | 98, 99, 100 | identity, 98.59% similarity) |
| | | | | | | | | WP_081115173.1 (97.98% |
| | | | | | | | | identity, 98.59% similarity) |
| | | | | | | | | WP_034698948.1 (97.78% |
| | | | | | | | | identity, 98.59% similarity) |
| | | | | | | | | WP_081129583.1 (97.78% |
| | | | | | | | | identity, 98.39% similarity) |
| | | | | | | | | WP_010718719.1 (97.58% |
| | | | | | | | | identity, 98.59% similarity) |
| | | | | | | | | WP_081123241.1 (97.58% |
| | | | | | | | | identity, 98.19% similarity) |
| | | | | | | | | WP_081182882.1 (82.26% |
| | | | | | | | | identity, 90.73% similarity) |
| | | | | | | | | WP_065772608.1 (50.39% |
| | | | | | | | | identity, 63.67% similarity) |
| | | | | | | | | APG04418.0 (45.28% |
| | | | | | | | | identity, 63.2% similarity) |
| APG05724.0 | 193 | | | | Bin | 35, 40, 45, 50, 55, 60, 65, 70, | 45, 50, 55, 60, 65, | AGG04857.1 (45.95% |
| | | | | | | 75, 80, 85, 90, 91, 92, 93, | 70, 75, 80, 85, | identity, 52.03% similarity) |
| | | | | | | 94, 95, 96, 97, 98, 99, 100 | 90, 91, 92, 93, | AGG04857.1 (45.95% |
| | | | | | | | 94, 95, 96, 97, 98, | identity, 52.03% similarity) |
| | | | | | | | 99, 100 | AGG04857.1 (45.95% |
| | | | | | | | | identity, 52.03% similarity) |
| | | | | | | | | ESX81968.1 (38.18% identity, |
| | | | | | | | | 49.84% similarity) |
| | | | | | | | | ESX81968.1 (38.18% identity, |
| | | | | | | | | 49.84% similarity) |
| | | | | | | | | ESX81968.1 (38.18% identity, |
| | | | | | | | | 49.84% similarity) |
| | | | | | | | | WP_005546152.1 (35.6% |
| | | | | | | | | identity, 39.16% similarity) |
| | | | | | | | | WP_005546152.1 (35.6% |
| | | | | | | | | identity, 39.16% similarity) |
| | | | | | | | | WP_005546152.1 (35.6% |
| | | | | | | | | identity, 39.16% similarity) |
| | | | | | | | | WP_005546152.1 (35.6% |
| | | | | | | | | identity, 39.16% similarity) |
| APG05766.0 | 194 | 195 | | | MTX | 85, 90, 91, 92, 93, 94, 95, 96, | 90, 91, 92, 93, 94, | APG02921.0 (83.76% |
| | | | | | | 97, 98, 99, 100 | 95, 96, 97, 98, | identity, 88.85% similarity) |
| | | | | | | | 99, 100 | APG07049.0 (83.44% |
| | | | | | | | | identity, 88.85% similarity) |
| | | | | | | | | APG06989.0 (83.12% |
| | | | | | | | | identity, 89.49% similarity) |
| | | | | | | | | APG08990.0 (82.17% |
| | | | | | | | | identity, 88.54% similarity) |
| | | | | | | | | APG04226.0 (81.59% |
| | | | | | | | | identity, 87.3% similarity) |
| | | | | | | | | WP_016132978.1 (81.21% |
| | | | | | | | | identity, 88.85% similarity) |
| | | | | | | | | APG01536.0 (81.21% |
| | | | | | | | | identity, 88.22% similarity) |
| | | | | | | | | APG05084.0 (81.21% |
| | | | | | | | | identity, 87.58% similarity) |
| | | | | | | | | WP_025150761.1 (81.21% |
| | | | | | | | | identity, 87.58% similarity) |
| | | | | | | | | APG05969.0 (80.95% |
| | | | | | | | | identity, 87.62% similarity) |
| APG05777.0 | 196 | 197 | | | MTX | 75, 80, 85, 90, 91, 92, 93, 94, | 85, 90, 91, 92, 93, | WP_075719043.1 (98.21% |
| | | | | | | 95, 96, 97, 98, 99, 100 | 94, 95, 96, 97, | identity, 99.49% similarity) |
| | | | | | | | 98, 99, 100 | WP_075716758.1 (93.62% |
| | | | | | | | | identity, 96.94% similarity) |
| | | | | | | | | WP_078187816.1 (79.26% |
| | | | | | | | | identity, 87.65% similarity) |
| | | | | | | | | APG00681.0 |
| | | | | | | | | US_2016_0355842_A1-158 |
| | | | | | | | | (74.89% identity, 81.74% |
| | | | | | | | | similarity) |
| | | | | | | | | APG08381.0 (61.84% |
| | | | | | | | | identity, 75.36% similarity) |
| | | | | | | | | OQR53340.1 (61.76% |
| | | | | | | | | identity, 75.49% similarity) |
| | | | | | | | | KXY21848.1 (61.52% identity, |
| | | | | | | | | 75.74% similarity) |
| | | | | | | | | WP_078185377.1 (61.52% |
| | | | | | | | | identity, 75.49% similarity) |
| | | | | | | | | APG02362.0 (61.43% |
| | | | | | | | | identity, 75.68% similarity) |
| | | | | | | | | APG06372.0 (61.27% |
| | | | | | | | | identity, 75.74% similarity) |
| | | | | | | | | CDN39409.1 (61.27% |
| | | | | | | | | identity, 75.49% similarity) |
| | | | | | | | | APG03337.0 (61.27% |
| | | | | | | | | identity, 75.0% similarity) |
| APG05787.0 | 198 | 199 | | | TX | 45, 50, 55, 60, 65, 70, 75, 80, | 60, 65, 70, 75, 80, | APG00371.0 |
| | | | | | | 85, 90, 91, 92, 93, 94, 95, | 85, 90, 91, 92, | US_2016_0355842_A1-72 |
| | | | | | | 96, 97, 98, 99, 100 | 93, 94, 95, 96, | (42.57% identity, 58.6% |
| | | | | | | | 97, 98, 99, 100 | similarity) |
| | | | | | | | | WP_075718639.1 (38.46% |
| | | | | | | | | identity, 53.02% similarity) |
| | | | | | | | | WP_075716873.1 (38.19% |
| | | | | | | | | identity, 52.75% similarity) |
| | | | | | | | | APG03638.0 (37.82% identity, |
| | | | | | | | | 52.66% similarity) |
| | | | | | | | | OOR71217.1 (37.82% |
| | | | | | | | | identity, 52.66% similarity) |
| | | | | | | | | APG08605.0 (37.54% identity, |
| | | | | | | | | 52.66% similarity) |
| | | | | | | | | APG03848.0 (37.02% |
| | | | | | | | | identity, 51.93% similarity) |
| | | | | | | | | ANS51624.1 (32.67% identity, |
| | | | | | | | | 49.43% similarity) |
| | | | | | | | | ANS52378.1 (32.67% identity, |
| | | | | | | | | 49.43% similarity) |
| | | | | | | | | APG00451.0 |
| | | | | | | | | US_2016_0355842_A1-94 |
| | | | | | | | | (31.7% identity, 53.03% |
| | | | | | | | | similarity) |
| APG05848.0 | 200 | | | | Cry | 60, 65, 70, 75, 80, 85, 90, 91, | 65, 70, 75, 80, 85, | WP_048536308.1 (100.0% |
| | | | | | | 92, 93, 94, 95, 96, 97, 98, | 90, 91, 92, 93, | identity, 100.0% similarity) |
| | | | | | | 99, 100 | 94, 95, 96, 97, | APG00251.0 |
| | | | | | | | 98, 99, 100 | US_2016_0311864_A1-97 |
| | | | | | | | | (56.47% identity, 63.79% |
| | | | | | | | | similarity) |
| | | | | | | | | APG00233.0 |
| | | | | | | | | US_2016_0311864_A1-88 |
| | | | | | | | | (50.46% identity, 60.77% |
| | | | | | | | | similarity) |
| | | | | | | | | OPA11477.1 (44.47% identity, |
| | | | | | | | | 62.17% similarity) |
| | | | | | | | | US_8318900_B2-90 (34.08% |
| | | | | | | | | identity, 48.97% similarity) |
| | | | | | | | | APG05139.0 (33.68% identity, |
| | | | | | | | | 48.8% similarity) |
| | | | | | | | | APG00787.0 (31.09% |
| | | | | | | | | identity, 45.72% similarity) |
| | | | | | | | | APG00625.0 |
| | | | | | | | | US_2016_0355842_A1-146 |
| | | | | | | | | (28.94% identity, 41.95% |
| | | | | | | | | similarity) |
| | | | | | | | | APG00435.0 |
| | | | | | | | | US_2016_0366881_A1-59 |
| | | | | | | | | (28.41% identity, 44.19% |
| | | | | | | | | similarity) |
| | | | | | | | | OTX35223.1 (28.41% identity, |
| | | | | | | | | 44.19% similarity) |
| APG05918.0 | 201 | | | | MTX | 70, 75, 80, 85, 90, 91, 92, 93, | 80, 85, 90, 91, 92, | APG09455.0 (67.86% |
| | | | | | | 94, 95, 96, 97, 98, 99, 100 | 93, 94, 95, 96, | identity, 78.25% similarity) |
| | | | | | | | 97, 98, 99, 100 | APG06880.0 (67.83% |
| | | | | | | | | identity, 77.07% similarity) |
| | | | | | | | | APG00598.0 |
| | | | | | | | | US_2016_0355842_A1-140 |
| | | | | | | | | (35.56% identity, 54.6% |
| | | | | | | | | similarity) |
| APG06048.0 | 202 | 203 | | | MTX | 45, 50, 55, 60, 65, 70, 75, 80, | 65, 70, 75, 80, 85, | WP_006918908.1 (98.01% |
| | | | | | | 85, 90, 91, 92, 93, 94, 95, | 90, 91, 92, 93, | identity, 98.01% similarity) |
| | | | | | | 96, 97, 98, 99, 100 | 94, 95, 96, 97, | APG02083.0 (93.02% identity, |
| | | | | | | | 98, 99, 100 | 96.35% similarity) |
| | | | | | | | | APG01087.0 (42.64% |
| | | | | | | | | identity, 63.19% similarity) |
| | | | | | | | | APG09602.0 (33.33% identity, |
| | | | | | | | | 51.54% similarity) |
| | | | | | | | | WP_065845806.1 (33.33% |
| | | | | | | | | identity, 51.54% similarity) |
| | | | | | | | | APG07682.0 (31.75% |
| | | | | | | | | identity, 49.26% similarity) |
| | | | | | | | | APG00143.0 |
| | | | | | | | | US_2016_0355842_A1-4 |
| | | | | | | | | (31.64% identity, 52.24% |
| | | | | | | | | similarity) |
| | | | | | | | | APG00833.0 |
| | | | | | | | | US_2016_0355842_A1-175 |
| | | | | | | | | (31.64% identity, 50.75% |
| | | | | | | | | similarity) |
| | | | | | | | | APG00441.0 |
| | | | | | | | | US_2016_0355842_A1-91 |
| | | | | | | | | (31.44% identity, 51.2% |
| | | | | | | | | similarity) |
| | | | | | | | | APG00444.0 |
| | | | | | | | | US_2016_0355842_A1-93 |
| | | | | | | | | (31.44% identity, 50.9% |
| | | | | | | | | similarity) |
| APG06056.0 | 204 | 205 | | | Cry | 65, 70, 75, 80, 85, 90, 91, 92, | 80, 85, 90, 91, 92, | US_8461421_B2-264 (64.1% |
| | | | | | | 93, 94, 95, 96, 97, 98, 99, | 93, 94, 95, 96, | identity, 75.26% similarity) |
| | | | | | | 100 | 97, 98, 99, 100 | APG08350.0 (64.03% |
| | | | | | | | | identity, 74.1% similarity) |
| | | | | | | | | OUB04094.1 (63.87% |
| | | | | | | | | identity, 75.03% similarity) |
| | | | | | | | | US_8461421_B2-140 (62.3% |
| | | | | | | | | identity, 73.15% similarity) |
| | | | | | | | | US_8461421_B2-204 (49.54% |
| | | | | | | | | identity, 61.01% similarity) |
| | | | | | | | | US_8461421_B2-94 (49.04% |
| | | | | | | | | identity, 62.41% similarity) |
| | | | | | | | | US_9567381_B2-376 (48.99% |
| | | | | | | | | identity, 64.53% similarity) |
| | | | | | | | | APG00534.0 (45.52% |
| | | | | | | | | identity, 60.55% similarity) |
| | | | | | | | | US_9567381_B2-375 (44.67% |
| | | | | | | | | identity, 61.28% similarity) |
| | | | | | | | | APG00120.0 |
| | | | | | | | | US_2016_0177333_A1-68 |
| | | | | | | | | (44.66% identity, 58.64% |
| | | | | | | | | similarity) |
| APG06121.0 | 206 | 207 | | | Cyt | 80, 85, 90, 91, 92, 93, 94, 95, | 91, 92, 93, 94, 95, | WP_030752998.1 (96.88% |
| | | | | | | 96, 97, 98, 99, 100 | 96, 97, 98, 99, | identity, 98.96% similarity) |
| | | | | | | | 100 | WP_031015242.1 (88.54% |
| | | | | | | | | identity, 93.75% similarity) |
| | | | | | | | | WP_043228659.1 (88.54% |
| | | | | | | | | identity, 93.75% similarity) |
| | | | | | | | | WP_030497750.1 (88.02% |
| | | | | | | | | identity, 94.27% similarity) |
| | | | | | | | | WP_062759953.1 (80.21% |
| | | | | | | | | identity, 90.62% similarity) |
| | | | | | | | | WP_041132690.1 (80.21% |
| | | | | | | | | identity, 89.06% similarity) |
| | | | | | | | | APG00134.0 |
| | | | | | | | | US_2016_0311864_A1-32 |
| | | | | | | | | (79.69% identity, 90.1% |
| | | | | | | | | similarity) |
| | | | | | | | | WP_030212110.1 (79.69% |
| | | | | | | | | identity, 90.1% similarity) |
| | | | | | | | | WP_053644218.1 (79.17% |
| | | | | | | | | identity, 90.1% similarity) |
| | | | | | | | | WP_073813972.1 (79.17% |
| | | | | | | | | identity, 90.1% similarity) |
| APG06141.0 | 208 | | | | PIP | 85, 90, 91, 92, 93, 94, 95, 96, | 92, 93, 94, 95, 96, | APG02685.0 (86.81% identity, |
| | | | | | | 97, 98, 99, 100 | 97, 98, 99, 100 | 95.24% similarity) |
| | | | | | | | | APG04693.0 (86.13% identity, |
| | | | | | | | | 94.53% similarity) |
| | | | | | | | | APG00659.0 (84.56% |
| | | | | | | | | identity, 86.91% similarity) |
| | | | | | | | | CA_2878263-105 (81.32% |
| | | | | | | | | identity, 91.58% similarity) |
| | | | | | | | | WP_020294695.1 (80.95% |
| | | | | | | | | identity, 91.21% similarity) |
| | | | | | | | | CA_2878263-148 (80.59% |
| | | | | | | | | identity, 91.21% similarity) |
| | | | | | | | | CA_2878263-126 (80.59% |
| | | | | | | | | identity, 90.48% similarity) |
| | | | | | | | | WP_078473056.1 (80.22% |
| | | | | | | | | identity, 91.21% similarity) |
| | | | | | | | | CA_2878263-4 (80.22% |
| | | | | | | | | identity, 90.84% similarity) |
| | | | | | | | | CA_2878263-149 (80.22% |
| | | | | | | | | identity, 90.11% similarity) |
| | | | | | | | | CA_2878263-124 (80.22% |
| | | | | | | | | identity, 89.01% similarity) |
| | | | | | | | | CA_2878263-134 (80.22% |
| | | | | | | | | identity, 89.01% similarity) |
| APG06156.0 | 209 | 210 | | | Cry | 60, 65, 70, 75, 80, 85, 90, 91, | 70, 75, 80, 85, 90, | US_9567381_B2-232 (57.03% |
| | | | | | | 92, 93, 94, 95, 96, 97, 98, | 91, 92, 93, 94, | identity, 68.36% similarity) |
| | | | | | | 99, 100 | 95, 96, 97, 98, | WP_016098327.1 (56.31% |
| | | | | | | | 99, 100 | identity, 68.39% similarity) |
| | | | | | | | | AGV55017.1 (55.42% |
| | | | | | | | | identity, 69.24% similarity) |
| | | | | | | | | APG07037.0 (53.48% |
| | | | | | | | | identity, 66.49% similarity) |
| | | | | | | | | US_8461415_B2-30 (52.42% |
| | | | | | | | | identity, 65.78% similarity) |
| | | | | | | | | OUB62847.1 (52.11% |
| | | | | | | | | identity, 65.26% similarity) |
| | | | | | | | | US_9567381_B2-233 (51.09% |
| | | | | | | | | identity, 64.5% similarity) |
| | | | | | | | | APG00810.0 (50.42% |
| | | | | | | | | identity, 63.27% similarity) |
| | | | | | | | | APG00558.0 (31.54% |
| | | | | | | | | identity, 46.68% similarity) |
| | | | | | | | | APG00153.0 |
| | | | | | | | | US_2016_0311864_A1-38 |
| | | | | | | | | (31.01% identity, 45.08% |
| | | | | | | | | similarity) |
| APG06236.0 | 211 | 212 | | | MTX | 75, 80, 85, 90, 91, 92, 93, 94, | 90, 91, 92, 93, 94, | APG00014.0 |
| | | | | | | 95, 96, 97, 98, 99, 100 | 95, 96, 97, 98, | US_2016_0304898_A1-24 |
| | | | | | | | 99, 100 | (73.63% identity, 86.45% |
| | | | | | | | | similarity) |
| | | | | | | | | APG04013.0 (66.43% |
| | | | | | | | | identity, 79.72% similarity) |
| | | | | | | | | APG04375.0 (55.68% |
| | | | | | | | | identity, 71.79% similarity) |
| | | | | | | | | OTX35276.1 (55.68% identity, |
| | | | | | | | | 70.7% similarity) |
| | | | | | | | | APG08525.0 (54.01% |
| | | | | | | | | identity, 69.34% similarity) |
| | | | | | | | | APG07676.0 (53.28% |
| | | | | | | | | identity, 69.71% similarity) |
| | | | | | | | | APG03686.0 (53.28% |
| | | | | | | | | identity, 68.25% similarity) |
| | | | | | | | | APG04793.0 (53.28% |
| | | | | | | | | identity, 67.88% similarity) |
| | | | | | | | | OUB46342.1 (52.75% |
| | | | | | | | | identity, 68.5% similarity) |
| | | | | | | | | APG01202.0 (52.55% |
| | | | | | | | | identity, 67.15% similarity) |
| APG06287.0 | 213 | | | | Cry | 75, 80, 85, 90, 91, 92, 93, 94, | 85, 90, 91, 92, 93, | APG00005.0 |
| | | | | | | 95, 96, 97, 98, 99, 100 | 94, 95, 96, 97, | US_2016_0177333_A1-4 |
| | | | | | | | 98, 99, 100 | (73.49% identity, 83.58% |
| | | | | | | | | similarity) |
| | | | | | | | | US_8461415_B2-28 (30.49% |
| | | | | | | | | identity, 43.5% similarity) |
| | | | | | | | | WP_016099738.1 (29.88% |
| | | | | | | | | identity, 46.52% similarity) |
| | | | | | | | | US_8318900_B2-149 (29.62% |
| | | | | | | | | identity, 42.49% similarity) |
| | | | | | | | | APG07799.0 (29.2% identity, |
| | | | | | | | | 42.89% similarity) |
| | | | | | | | | US_8461415_B2-1 (29.15% |
| | | | | | | | | identity, 41.97% similarity) |
| | | | | | | | | APG00864.0 (28.8% identity, |
| | | | | | | | | 42.93% similarity) |
| | | | | | | | | APG00981.0 (28.06% |
| | | | | | | | | identity, 40.3% similarity) |
| | | | | | | | | APG04010.0 (27.68% identity, |
| | | | | | | | | 40.56% similarity) |
| | | | | | | | | US_8318900_B2-111 (27.54% |
| | | | | | | | | identity, 43.01% similarity) |
| APG06452.0 | 214 | 215, 216 | | | MTX | 5, 10, 15, 20, 25, 30, 35, 40, | 5, 10, 15, 20, 25, | WP_053730552.1 (42.86% |
| | | | | | | 45, 50, 55, 60, 65, 70, 75, 80, | 30, 35, 40, 45, | identity, 43.8% similarity) |
| | | | | | | 85, 90, 91, 92, 93, 94, 95, | 50, 55, 60, 65, 70, | WP_071966410.1 (35.21% |
| | | | | | | 96, 97, 98, 99, 100 | 75, 80, 85, 90, | identity, 39.09% similarity) |
| | | | | | | | 91, 92, 93, 94, | WP_049718022.1 (33.82% |
| | | | | | | | 95, 96, 97, 98, 99, | identity, 37.53% similarity) |
| | | | | | | | 100 | WP_066939367.1 (33.02% |
| | | | | | | | | identity, 37.55% similarity) |
| | | | | | | | | WP_052854031.1 (32.58% |
| | | | | | | | | identity, 36.57% similarity) |
| | | | | | | | | WP_016577252.1 (32.32% |
| | | | | | | | | identity, 36.29% similarity) |
| | | | | | | | | WP_043262757.1 (32.13% |
| | | | | | | | | identity, 36.53% similarity) |
| | | | | | | | | WP_073445788.1 (31.65% |
| | | | | | | | | identity, 36.7% similarity) |
| | | | | | | | | WP_039633689.1 (31.56% |
| | | | | | | | | identity, 36.48% similarity) |
| | | | | | | | | WP_067347886.1 (30.66% |
| | | | | | | | | identity, 36.55% similarity) |
| APG06456.0 | 217 | 218 | | | Cry | 65, 70, 75, 80, 85, 90, 91, 92, | 80, 85, 90, 91, 92, | US_8461421_B2-75 (64.59% |
| | | | | | | 93, 94, 95, 96, 97, 98, 99, | 93, 94, 95, 96, | identity, 75.35% similarity) |
| | | | | | | 100 | 97, 98, 99, 100 | US_8461421_B2-83 (63.89% |
| | | | | | | | | identity, 74.05% similarity) |
| | | | | | | | | WP_078205438.1 (60.72% |
| | | | | | | | | identity, 71.09% similarity) |
| | | | | | | | | AQM56938.1 (56.67% |
| | | | | | | | | identity, 67.65% similarity) |
| | | | | | | | | US_2015_0218583_A1-3 |
| | | | | | | | | (56.5% identity, 66.16% |
| | | | | | | | | similarity) |
| | | | | | | | | APG00115.0 |
| | | | | | | | | US_2016_0177333_A1-65 |
| | | | | | | | | (54.93% identity, 64.17% |
| | | | | | | | | similarity) |
| | | | | | | | | APG00115.0 |
| | | | | | | | | US_2016_0177333_A1-65 |
| | | | | | | | | (54.93% identity, 64.17% |
| | | | | | | | | similarity) |
| | | | | | | | | APG00637.0 (53.88% |
| | | | | | | | | identity, 63.2% similarity) |
| | | | | | | | | APG00637.0 (53.88% |
| | | | | | | | | identity, 63.2% similarity) |
| | | | | | | | | AQM56939.1 (53.51% |
| | | | | | | | | identity, 63.0% similarity) |
| | | | | | | | | AQM56939.1 (53.51% |
| | | | | | | | | identity, 63.0% similarity) |
| APG06596.0 | 219 | 220 | | | MTX | 90, 91, 92, 93, 94, 95, 96, 97, | 92, 93, 94, 95, 96, | WP_016098181.1 (88.05% |
| | | | | | | 98, 99, 100 | 97, 98, 99, 100 | identity, 92.42% similarity) |
| | | | | | | | | APG02060.0 (86.88% |
| | | | | | | | | identity, 91.25% similarity) |
| | | | | | | | | OUB80919.1 (50.56% |
| | | | | | | | | identity, 63.33% similarity) |
| | | | | | | | | APG00384.0 |
| | | | | | | | | US_2016_0366881_A1-44 |
| | | | | | | | | (49.72% identity, 63.84% |
| | | | | | | | | similarity) |
| | | | | | | | | OUA92412.1 (49.44% |
| | | | | | | | | identity, 63.33% similarity) |
| | | | | | | | | APG00344.0 |
| | | | | | | | | US_2016_0366881_A1-22 |
| | | | | | | | | (48.89% identity, 66.39% |
| | | | | | | | | similarity) |
| | | | | | | | | APG01969.0 (48.88% |
| | | | | | | | | identity, 62.57% similarity) |
| | | | | | | | | APG03015.0 (48.21% |
| | | | | | | | | identity, 64.74% similarity) |
| | | | | | | | | OUC03766.1 (48.04% |
| | | | | | | | | identity, 63.13% similarity) |
| | | | | | | | | WP_016098287.1 (48.02% |
| | | | | | | | | identity, 63.84% similarity) |
| APG06633.0 | 221 | | | | Cry | 55, 60, 65, 70, 75, 80, 85, 90, | 75, 80, 85, 90, 91, | WP_017762621.1 (100.0% |
| | | | | | | 91, 92, 93, 94, 95, 96, 97, | 92, 93, 94, 95, | identity, 100.0% similarity) |
| | | | | | | 98, 99, 100 | 96, 97, 98, 99, | WP_080339908.1 (56.63% |
| | | | | | | | 100 | identity, 75.0% similarity) |
| | | | | | | | | APG00443.0 |
| | | | | | | | | US_2016_0355842_A1-92 |
| | | | | | | | | (53.87% identity, 71.35% |
| | | | | | | | | similarity) |
| | | | | | | | | APG00510.0 |
| | | | | | | | | US_2016_0355842_A1-114 |
| | | | | | | | | (39.66% identity, 52.74% |
| | | | | | | | | similarity) |
| | | | | | | | | KIZ30399.1 (39.66% identity, |
| | | | | | | | | 52.53% similarity) |
| APG06635.0 | 222 | 223 | | | MTX | 5, 10, 15, 20, 25, 30, 35, 40, | 5, 10, 15, 20, 25, | |
| | | | | | | 45, 50, 55, 60, 65, 70, 75, 80, | 30, 35, 40, 45, | |
| | | | | | | 85, 90, 91, 92, 93, 94, 95, | 50, 55, 60, 65, 70, | |
| | | | | | | 96, 97, 98, 99, 100 | 75, 80, 85, 90, | |
| | | | | | | | 91, 92, 93, 94, | |
| | | | | | | | 95, 96, 97, 98, 99, | |
| | | | | | | | 100 | |
| APG06681.0 | 224 | 225, 226 | | | Cry | 75, 80, 85, 90, 91, 92, 93, 94, | 85, 90, 91, 92, 93, | APG00165.0 |
| | | | | | | 95, 96, 97, 98, 99, 100 | 94, 95, 96, 97, | US_2016_0355842_A1-11 |
| | | | | | | | 98, 99, 100 | (70.14% identity, 80.71% |
| | | | | | | | | similarity) |
| | | | | | | | | US_8318900_B2-68 (58.24% |
| | | | | | | | | identity, 66.98% similarity) |
| | | | | | | | | US_8318900_B2-68 (58.24% |
| | | | | | | | | identity, 66.98% similarity) |
| | | | | | | | | AEH76817.1 (57.0% identity, |
| | | | | | | | | 66.69% similarity) |
| | | | | | | | | AEH76817.1 (57.0% identity, |
| | | | | | | | | 66.69% similarity) |
| | | | | | | | | US_9567381_B2-1403 (54.6% |
| | | | | | | | | identity, 68.47% similarity) |
| | | | | | | | | US_5670365_A-9 (54.55% |
| | | | | | | | | identity, 68.41% similarity) |
| | | | | | | | | US_2011_0239334_A1-80 |
| | | | | | | | | (54.51% identity, 68.36% |
| | | | | | | | | similarity) |
| | | | | | | | | US_2011_0239334_A1-88 |
| | | | | | | | | (52.67% identity, 64.94% |
| | | | | | | | | similarity) |
| | | | | | | | | US_2011_0239334_A1-74 |
| | | | | | | | | (52.5% identity, 66.37% |
| | | | | | | | | similarity) |
| APG06729.0 | 227 | 228 | | | MTX | 97, 98, 99, 100 | 98, 99, 100 | APG00768.0 |
| | | | | | | | | US_2016_0311864_A1-217 |
| | | | | | | | | (96.46% identity, 97.0% |
| | | | | | | | | similarity) |
| | | | | | | | | US_8796026_B2-6 (66.58% |
| | | | | | | | | identity, 80.16% similarity) |
| | | | | | | | | CA_2844913-58 (66.3% |
| | | | | | | | | identity, 80.98% similarity) |
| | | | | | | | | WP_061885068.1 (66.3% |
| | | | | | | | | identity, 79.89% similarity) |
| | | | | | | | | WP_000875423.1 (66.03% |
| | | | | | | | | identity, 79.89% similarity) |
| | | | | | | | | US_8796026_B2-8 (65.95% |
| | | | | | | | | identity, 80.0% similarity) |
| | | | | | | | | APG00991.0 (65.5% identity, |
| | | | | | | | | 81.4% similarity) |
| | | | | | | | | US_8796026_B2-10 (65.49% |
| | | | | | | | | identity, 79.35% similarity) |
| | | | | | | | | US_8796026_B2-4 (65.31% |
| | | | | | | | | identity, 80.22% similarity) |
| | | | | | | | | US_8796026_B2-14 (65.31% |
| | | | | | | | | identity, 79.95% similarity) |
| APG06744.0 | 229 | 230, 231 | | | MTX | 55, 60, 65, 70, 75, 80, 85, 90, | 70, 75, 80, 85, 90, | WP_008180054.1 (90.35% |
| | | | | | | 91, 92, 93, 94, 95, 96, 97, | 91, 92, 93, 94, | identity, 93.25% similarity) |
| | | | | | | 98, 99, 100 | 95, 96, 97, 98, | APG00049.0 |
| | | | | | | | 99, 100 | US_2016_0304898_A1-78 |
| | | | | | | | | (52.38% identity, 65.4% |
| | | | | | | | | similarity) |
| | | | | | | | | APG03297.0 (52.05% |
| | | | | | | | | identity, 66.56% similarity) |
| | | | | | | | | WP_003290257.1 (52.05% |
| | | | | | | | | identity, 66.56% similarity) |
| | | | | | | | | WP_016099228.1 (51.88% |
| | | | | | | | | identity, 66.88% similarity) |
| | | | | | | | | APG00693.0 (51.83% |
| | | | | | | | | identity, 67.38% similarity) |
| | | | | | | | | APG00495.0 (51.82% |
| | | | | | | | | identity, 66.67% similarity) |
| | | | | | | | | US_8461415_B2-31 (51.68% |
| | | | | | | | | identity, 67.28% similarity) |
| | | | | | | | | APG09869.0 (51.52% |
| | | | | | | | | identity, 67.88% similarity) |
| | | | | | | | | APG05497.0 (51.43% |
| | | | | | | | | identity, 66.03% similarity) |
| APG06751.0 | 232 | 233, 234 | | | Cry | 90, 91, 92, 93, 94, 95, 96, 97, | 94, 95, 96, 97, 98, | CA_2844913-203 (89.44% |
| | | | | | | 98, 99, 100 | 99, 100 | identity, 93.98% similarity) |
| | | | | | | | | CA_2844913-204 (89.44% |
| | | | | | | | | identity, 93.98% similarity) |
| | | | | | | | | APG07125.0 (51.01% |
| | | | | | | | | identity, 53.16% similarity) |
| | | | | | | | | CA_2844913-202 (25.38% |
| | | | | | | | | identity, 42.75% similarity) |
| APG06820.0 | 235 | 236, 237 | | | MTX | 50, 55, 60, 65, 70, 75, 80, 85, | 65, 70, 75, 80, 85, | US_8318900_B2-77 (45.26% |
| | | | | | | 90, 91, 92, 93, 94, 95, 96, | 90, 91, 92, 93, | identity, 60.43% similarity) |
| | | | | | | 97, 98, 99, 100 | 94, 95, 96, 97, | APG04586.0 (44.99% |
| | | | | | | | 98, 99, 100 | identity, 60.43% similarity) |
| | | | | | | | | APG09100.0 (43.09% |
| | | | | | | | | identity, 59.62% similarity) |
| | | | | | | | | APG00718.0 (34.22% |
| | | | | | | | | identity, 48.93% similarity) |
| | | | | | | | | APG00860.0 |
| | | | | | | | | US_2016_0355842_A1-180 |
| | | | | | | | | (33.42% identity, 45.26% |
| | | | | | | | | similarity) |
| | | | | | | | | APG00323.0 |
| | | | | | | | | US_2016_0355842_A1-60 |
| | | | | | | | | (32.2% identity, 51.31% |
| | | | | | | | | similarity) |
| | | | | | | | | APG00586.0 |
| | | | | | | | | US_2016_0355842_A1-135 |
| | | | | | | | | (32.2% identity, 50.26% |
| | | | | | | | | similarity) |
| | | | | | | | | APG03324.0 (31.68% |
| | | | | | | | | identity, 49.74% similarity) |
| | | | | | | | | APG00420.0 |
| | | | | | | | | US_2016_0355842_A1-85 |
| | | | | | | | | (31.59% identity, 51.17% |
| | | | | | | | | similarity) |
| | | | | | | | | APG04750.0 (30.99% identity, |
| | | | | | | | | 50.26% similarity) |
| APG06920.0 | 238 | | | | Bin | 90, 91, 92, 93, 94, 95, 96, 97, | 92, 93, 94, 95, 96, | APG00413.0 |
| | | | | | | 98, 99, 100 | 97, 98, 99, 100 | US_2016_0311864_A1-174 |
| | | | | | | | | (86.21% identity, 89.92% |
| | | | | | | | | similarity) |
| | | | | | | | | APG09069.0 (85.9% identity, |
| | | | | | | | | 89.89% similarity) |
| | | | | | | | | APG00230.0 |
| | | | | | | | | US_2016_0311864_A1-85 |
| | | | | | | | | (83.86% identity, 91.53% |
| | | | | | | | | similarity) |
| | | | | | | | | KEZ80012.1 (82.71% identity, |
| | | | | | | | | 89.1% similarity) |
| | | | | | | | | US_9321814_B2-3 (80.32% |
| | | | | | | | | identity, 86.44% similarity) |
| | | | | | | | | US_9321814_B2-2 (80.11% |
| | | | | | | | | identity, 86.21% similarity) |
| | | | | | | | | US_9321814_B2-4 (78.72% |
| | | | | | | | | identity, 84.84% similarity) |
| | | | | | | | | US_9321814_B2-5 (77.66% |
| | | | | | | | | identity, 83.78% similarity) |
| | | | | | | | | WP_017154552.1 (71.92% |
| | | | | | | | | identity, 82.15% similarity) |
| | | | | | | | | APG03279.0 (70.82% |
| | | | | | | | | identity, 79.05% similarity) |
| APG06936.0 | 239 | 240 | | | Cry34 | 5, 10, 15, 20, 25, 30, 35, 40, | 5, 10, 15, 20, 25, | WP_045520498.1 (27.11% |
| | | | | | | 45, 50, 55, 60, 65, 70, 75, 80, | 30, 35, 40, 45, | identity, 29.74% similarity) |
| | | | | | | 85, 90, 91, 92, 93, 94, 95, | 50, 55, 60, 65, 70, | |
| | | | | | | 96, 97, 98, 99, 100 | 75, 80, 85, 90, | |
| | | | | | | | 91, 92, 93, 94, | |
| | | | | | | | 95, 96, 97, 98, 99, | |
| | | | | | | | 100 | |
| APG07032.0 | 241 | 242 | | | Vip4 | 55, 60, 65, 70, 75, 80, 85, 90, | 75, 80, 85, 90, 91, | APG01474.0 (54.06% |
| | | | | | | 91, 92, 93, 94, 95, 96, 97, | 92, 93, 94, 95, | identity, 70.79% similarity) |
| | | | | | | 98, 99, 100 | 96, 97, 98, 99, | APG02585.0 (54.02% |
| | | | | | | | 100 | identity, 70.12% similarity) |
| | | | | | | | | APG02031.0 (53.51% identity, |
| | | | | | | | | 66.47% similarity) |
| | | | | | | | | WP_016123960.1 (53.41% |
| | | | | | | | | identity, 66.27% similarity) |
| | | | | | | | | CA_2844913-129 (53.14% |
| | | | | | | | | identity, 66.3% similarity) |
| | | | | | | | | CA_2844913-130 (53.14% |
| | | | | | | | | identity, 66.3% similarity) |
| | | | | | | | | APG04069.0 (52.26% |
| | | | | | | | | identity, 67.3% similarity) |
| | | | | | | | | AGT29561.1 (51.12% identity, |
| | | | | | | | | 68.43% similarity) |
| | | | | | | | | SCC34829.1 (51.12% identity, |
| | | | | | | | | 65.27% similarity) |
| | | | | | | | | US_2017_0044568_A1-2 |
| | | | | | | | | (50.4% identity, 65.36% |
| | | | | | | | | similarity) |
| APG07034.0 | 243 | 244 | | | MTX | 94, 95, 96, 97, 98, 99, 100 | 96, 97, 98, 99, 100 | CA_2844913-106 (93.42% |
| | | | | | | | | identity, 95.53% similarity) |
| | | | | | | | | APG03192.0 (50.12% identity, |
| | | | | | | | | 64.76% similarity) |
| | | | | | | | | APG00311.0 |
| | | | | | | | | US_2016_0366881_A1-6 |
| | | | | | | | | (45.48% identity, 58.93% |
| | | | | | | | | similarity) |
| | | | | | | | | OUB06458.1 (45.48% |
| | | | | | | | | identity, 58.93% similarity) |
| | | | | | | | | APG00488.0 |
| | | | | | | | | US_2016_0355842_A1-108 |
| | | | | | | | | (41.51% identity, 59.43% |
| | | | | | | | | similarity) |
| | | | | | | | | APG04865.0 (40.09% identity, |
| | | | | | | | | 58.49% similarity) |
| | | | | | | | | APG00470.0 |
| | | | | | | | | US_2016_0366881_A1-84 |
| | | | | | | | | (25.97% identity, 39.68% |
| | | | | | | | | similarity) |
| | | | | | | | | OUB08317.1 (25.97% |
| | | | | | | | | identity, 39.68% similarity) |
| APG07047.0 | 245 | 246 | | | Cry | 90, 91, 92, 93, 94, 95, 96, 97, | 93, 94, 95, 96, 97, | US_9567381_B2-326 (88.91% |
| | | | | | | 98, 99, 100 | 98, 99, 100 | identity, 92.53% similarity) |
| | | | | | | | | JP_2002_335967-21 (88.91% |
| | | | | | | | | identity, 92.45% similarity) |
| | | | | | | | | APG06650.0 (88.19% |
| | | | | | | | | identity, 90.9% similarity) |
| | | | | | | | | WO_2016_109214-2 (86.18% |
| | | | | | | | | identity, 91.18% similarity) |
| | | | | | | | | APG00687.0 (84.5% identity, |
| | | | | | | | | 89.51% similarity) |
| | | | | | | | | US_2014_0096281_A1-4 |
| | | | | | | | | (83.68% identity, 89.35% |
| | | | | | | | | similarity) |
| | | | | | | | | JP_2002_335967-3 (79.21% |
| | | | | | | | | identity, 82.4% similarity) |
| | | | | | | | | APG07679.0 (59.45% |
| | | | | | | | | identity, 70.2% similarity) |
| | | | | | | | | US_8759619_B2-27 (56.41% |
| | | | | | | | | identity, 65.2% similarity) |
| | | | | | | | | US_8461421_B2-70 (55.63% |
| | | | | | | | | identity, 67.73% similarity) |
| APG07178.0 | 247 | 248 | | | Bin | 60, 65, 70, 75, 80, 85, 90, 91, | 75, 80, 85, 90, 91, | CA_2844913-22 (59.54% |
| | | | | | | 92, 93, 94, 95, 96, 97, 98, | 92, 93, 94, 95, | identity, 71.76% similarity) |
| | | | | | | 99, 100 | 96, 97, 98, 99, | APG00551.0 |
| | | | | | | | 100 | US_2016_0366881_A1-109 |
| | | | | | | | | (45.93% identity, 57.65% |
| | | | | | | | | similarity) |
| | | | | | | | | APG00282.0 |
| | | | | | | | | US_2016_0311864_A1-116 |
| | | | | | | | | (45.33% identity, 52.75% |
| | | | | | | | | similarity) |
| | | | | | | | | APG00308.0 |
| | | | | | | | | US_2016_0311864_A1-135 |
| | | | | | | | | (44.61% identity, 50.63% |
| | | | | | | | | similarity) |
| | | | | | | | | WP_033679178.1 (44.53% |
| | | | | | | | | identity, 49.22% similarity) |
| | | | | | | | | US_8318900_B2-72 (40.63% |
| | | | | | | | | identity, 49.34% similarity) |
| | | | | | | | | APG00295.0 |
| | | | | | | | | US_2016_0311864_A1-128 |
| | | | | | | | | (40.62% identity, 46.32% |
| | | | | | | | | similarity) |
| | | | | | | | | CA_2844913-146 (40.0% |
| | | | | | | | | identity, 47.65% similarity) |
| | | | | | | | | APG09977.0 (39.95% |
| | | | | | | | | identity, 49.35% similarity) |
| | | | | | | | | APG00844.0 |
| | | | | | | | | US_2016_0311864_A1-221 |
| | | | | | | | | (39.43% identity, 48.56% |
| | | | | | | | | similarity) |
| | | | | | | | | APG01059.0 (39.43% identity, |
| | | | | | | | | 48.04% similarity) |
| APG07202.0 | 249 | 250 | | | Bin | 40, 45, 50, 55, 60, 65, 70, 75, | 60, 65, 70, 75, 80, | APG08348.0 (62.7% identity, |
| | | | | | | 80, 85, 90, 91, 92, 93, 94, | 85, 90, 91, 92, | 74.34% similarity) |
| | | | | | | 95, 96, 97, 98, 99, 100 | 93, 94, 95, 96, | AKG37966.1 (46.51% identity, |
| | | | | | | | 97, 98, 99, 100 | 60.75% similarity) |
| | | | | | | | | WP_052756038.1 (46.4% |
| | | | | | | | | identity, 60.53% similarity) |
| | | | | | | | | WP_042162506.1 (44.21% |
| | | | | | | | | identity, 60.53% similarity) |
| | | | | | | | | WP_002016877.1 (37.8% |
| | | | | | | | | identity, 57.22% similarity) |
| | | | | | | | | WP_016097060.1 (37.8% |
| | | | | | | | | identity, 56.17% similarity) |
| | | | | | | | | APG00568.0 |
| | | | | | | | | US_2016_0311864_A1-391 |
| | | | | | | | | (36.68% identity, 52.26% |
| | | | | | | | | similarity) |
| | | | | | | | | APG00602.0 |
| | | | | | | | | US_2016_0366881_A1-118 |
| | | | | | | | | (36.57% identity, 51.74% |
| | | | | | | | | similarity) |
| | | | | | | | | WP_000143307.1 (35.97% |
| | | | | | | | | identity, 53.32% similarity) |
| | | | | | | | | APG00494.0 (35.88% |
| | | | | | | | | identity, 53.44% similarity) |
| APG07340.0 | 251 | 253, 252 | | | MTX | 5, 10, 15, 20, 25, 30, 35, 40, | 5, 10, 15, 20, 25, | WP_064302253.1 (97.68% |
| | | | | | | 45, 50, 55, 60, 65, 70, 75, 80, | 30, 35, 40, 45, | identity, 97.68% similarity) |
| | | | | | | 85, 90, 91, 92, 93, 94, 95, | 50, 55, 60, 65, 70, | WP_056773433.1 (31.09% |
| | | | | | | 96, 97, 98, 99, 100 | 75, 80, 85, 90, | identity, 46.74% similarity) |
| | | | | | | | 91, 92, 93, 94, | WP_072955795.1 (25.53% |
| | | | | | | | 95, 96, 97, 98, 99, | identity, 43.19% similarity) |
| | | | | | | | 100 | AQT70550.1 (25.16% identity, |
| | | | | | | | | 39.09% similarity) |
| APG07562.0 | 254 | | | | Bin | 40, 45, 50, 55, 60, 65, 70, 75, | 45, 50, 55, 60, 65, | APG00706.0 (38.43% |
| | | | | | | 80, 85, 90, 91, 92, 93, 94, | 70, 75, 80, 85, | identity, 40.91% similarity) |
| | | | | | | 95, 96, 97, 98, 99, 100 | 90, 91, 92, 93, | |
| | | | | | | | 94, 95, 96, 97, 98, | |
| | | | | | | | 99, 100 | |
| APG07643.0 | 255 | 256 | | | Bin | 5, 10, 15, 20, 25, 30, 35, 40, | 5, 10, 15, 20, 25, | WP_034193354.1 (96.77% |
| | | | | | | 45, 50, 55, 60, 65, 70, 75, 80, | 30, 35, 40, 45, | identity, 96.77% similarity) |
| | | | | | | 85, 90, 91, 92, 93, 94, 95, | 50, 55, 60, 65, 70, | WP_085040093.1 (88.71% |
| | | | | | | 96, 97, 98, 99, 100 | 75, 80, 85, 90, | identity, 92.74% similarity) |
| | | | | | | | 91, 92, 93, 94, | WP_059574313.1 (87.1% |
| | | | | | | | 95, 96, 97, 98, 99, | identity, 92.74% similarity) |
| | | | | | | | 100 | WP_060965848.1 (85.48% |
| | | | | | | | | identity, 91.13% similarity) |
| | | | | | | | | WP_015876201.1 (82.26% |
| | | | | | | | | identity, 91.13% similarity) |
| | | | | | | | | KHJ62256.1 (76.87% identity, |
| | | | | | | | | 85.82% similarity) |
| | | | | | | | | WP_077021980.1 (70.63% |
| | | | | | | | | identity, 80.95% similarity) |
| | | | | | | | | WP_069617831.1 (69.84% |
| | | | | | | | | identity, 80.95% similarity) |
| | | | | | | | | WP_081083112.1 (51.61% |
| | | | | | | | | identity, 66.94% similarity) |
| | | | | | | | | WP_081274436.1 (46.38% |
| | | | | | | | | identity, 58.7% similarity) |
| APG07654.0 | 257 | 258 | | | Cry | 50, 55, 60, 65, 70, 75, 80, 85, | 60, 65, 70, 75, 80, | AHI15916.1 (71.37% identity, |
| | | | | | | 90, 91, 92, 93, 94, 95, 96, | 85, 90, 91, 92, | 81.98% similarity) |
| | | | | | | 97, 98, 99, 100 | 93, 94, 95, 96, | AHI15917.1 (48.73% identity, |
| | | | | | | | 97, 98, 99, 100 | 60.0% similarity) |
| | | | | | | | | AHI15915.1 (46.76% identity, |
| | | | | | | | | 60.24% similarity) |
| | | | | | | | | US_7923602_B2-6 (46.3% |
| | | | | | | | | identity, 59.35% similarity) |
| | | | | | | | | WP_080685557.1 (45.23% |
| | | | | | | | | identity, 58.26% similarity) |
| | | | | | | | | CA_2595901-15 (44.29% |
| | | | | | | | | identity, 57.07% similarity) |
| | | | | | | | | AEH76817.1 (43.82% identity, |
| | | | | | | | | 56.69% similarity) |
| | | | | | | | | US_8318900_B2-68 (43.82% |
| | | | | | | | | identity, 56.69% similarity) |
| | | | | | | | | APG06681.0 (42.48% identity, |
| | | | | | | | | 52.91% similarity) |
| | | | | | | | | US_9567381_B2-1403 |
| | | | | | | | | (42.36% identity, 53.96% |
| | | | | | | | | similarity) |
| | | | | | | | | US_9567381_B2-1403 |
| | | | | | | | | (42.36% identity, 53.96% |
| | | | | | | | | similarity) |
| APG07707.0 | 259 | 260, 261 | | | Cry | 45, 50, 55, 60, 65, 70, 75, 80, | 50, 55, 60, 65, 70, | APG00372.0 |
| | | | | | | 85, 90, 91, 92, 93, 94, 95, | 75, 80, 85, 90, | US_2016_0311864_A1-150 |
| | | | | | | 96, 97, 98, 99, 100 | 91, 92, 93, 94, | (41.97% identity, 48.58% |
| | | | | | | | 95, 96, 97, 98, 99, | similarity) |
| | | | | | | | 100 | APG00615.0 |
| | | | | | | | | US_2016_0366881_A1-119 |
| | | | | | | | | (41.7% identity, 48.49% |
| | | | | | | | | similarity) |
| | | | | | | | | APG00467.0 |
| | | | | | | | | US_2016_0311864_A1-184 |
| | | | | | | | | (32.38% identity, 42.21% |
| | | | | | | | | similarity) |
| | | | | | | | | APG00329.0 |
| | | | | | | | | US_2016_0355842_A1-62 |
| | | | | | | | | (29.34% identity, 37.7% |
| | | | | | | | | similarity) |
| | | | | | | | | US_8461415_B2-45 (29.26% |
| | | | | | | | | identity, 36.03% similarity) |
| | | | | | | | | WP_044306759.1 (29.09% |
| | | | | | | | | identity, 35.87% similarity) |
| | | | | | | | | WP_017762581.1 (27.97% |
| | | | | | | | | identity, 34.84% similarity) |
| | | | | | | | | APG00435.0 |
| | | | | | | | | US_2016_0366881_A1-59 |
| | | | | | | | | (26.77% identity, 34.65% |
| | | | | | | | | similarity) |
| | | | | | | | | OTX35223.1 (26.77% identity, |
| | | | | | | | | 34.65% similarity) |
| | | | | | | | | APG00424.0 |
| | | | | | | | | US_2016_0366881_A1-52 |
| | | | | | | | | (25.97% identity, 34.74% |
| | | | | | | | | similarity) |
| | | | | | | | | WP_060852738.1 (25.97% |
| | | | | | | | | identity, 34.74% similarity) |
| APG07751.0 | 262 | 263 | | | Cry | 80, 85, 90, 91, 92, 93, 94, 95, | 85, 90, 91, 92, 93, | WP_006922195.1 (98.1% |
| | | | | | | 96, 97, 98, 99, 100 | 94, 95, 96, 97, | identity, 98.24% similarity) |
| | | | | | | | 98, 99, 100 | APG00122.0 |
| | | | | | | | | US_2016_0304898_A1-143 |
| | | | | | | | | (75.04% identity, 82.5% |
| | | | | | | | | similarity) |
| | | | | | | | | APG00086.0 |
| | | | | | | | | US_2016_0304898_A1-113 |
| | | | | | | | | (61.33% identity, 73.09% |
| | | | | | | | | similarity) |
| | | | | | | | | APG04689.0 (60.67% identity, |
| | | | | | | | | 73.03% similarity) |
| | | | | | | | | WP_006919322.1 (60.53% |
| | | | | | | | | identity, 73.03% similarity) |
| | | | | | | | | APG00057.0 |
| | | | | | | | | US_2016_0304898_A1-88 |
| | | | | | | | | (34.21% identity, 52.83% |
| | | | | | | | | similarity) |
| | | | | | | | | WP_006927245.1 (33.65% |
| | | | | | | | | identity, 51.55% similarity) |
| | | | | | | | | APG01135.0 (30.91% identity, |
| | | | | | | | | 46.99% similarity) |
| | | | | | | | | WP_081631318.1 (30.83% |
| | | | | | | | | identity, 48.33% similarity) |
| | | | | | | | | APG00042.0 |
| | | | | | | | | US_2016_0304898_A1-67 |
| | | | | | | | | (30.71% identity, 48.27% |
| | | | | | | | | similarity) |
| APG07930.0 | 264 | | | | Bin | 92, 93, 94, 95, 96, 97, 98, 99, | 96, 97, 98, 99, 100 | APG00532.0 |
| | | | | | | 100 | | US_2016_0311864_A1-189 |
| | | | | | | | | (91.67% identity, 95.43% |
| | | | | | | | | similarity) |
| | | | | | | | | APG00499.0 |
| | | | | | | | | US_2016_0311864_A1-185 |
| | | | | | | | | (67.85% identity, 77.11% |
| | | | | | | | | similarity) |
| | | | | | | | | CA_2844913-50 (67.62% |
| | | | | | | | | identity, 77.46% similarity) |
| | | | | | | | | APG09069.0 (55.61% identity, |
| | | | | | | | | 68.41% similarity) |
| | | | | | | | | APG06920.0 (55.32% identity, |
| | | | | | | | | 69.09% similarity) |
| | | | | | | | | APG00413.0 |
| | | | | | | | | US_2016_0311864_A1-174 |
| | | | | | | | | (55.24% identity, 68.06% |
| | | | | | | | | similarity) |
| | | | | | | | | KEZ80012.1 (53.65% identity, |
| | | | | | | | | 67.45% similarity) |
| | | | | | | | | US_9321814_B2-5 (53.46% |
| | | | | | | | | identity, 67.55% similarity) |
| | | | | | | | | WP_017154552.1 (52.73% |
| | | | | | | | | identity, 67.79% similarity) |
| | | | | | | | | US_9321814_B2-3 (52.6% |
| | | | | | | | | identity, 66.67% similarity) |
| APG07944.0 | 265 | 266 | | | MTX | 90, 91, 92, 93, 94, 95, 96, 97, | 94, 95, 96, 97, 98, | APG00246.0 |
| | | | | | | 98, 99, 100 | 99, 100 | US_2016_0355842_A1-35 |
| | | | | | | | | (87.74% identity, 93.59% |
| | | | | | | | | similarity) |
| | | | | | | | | US_8461415_B2-38 (55.41% |
| | | | | | | | | identity, 68.11% similarity) |
| | | | | | | | | US_8461415_B2-36 (51.35% |
| | | | | | | | | identity, 67.03% similarity) |
| | | | | | | | | APG00593.0 |
| | | | | | | | | US_2016_0355842_A1-136 |
| | | | | | | | | (44.5% identity, 58.12% |
| | | | | | | | | similarity) |
| | | | | | | | | APG00995.0 |
| | | | | | | | | US_2016_0355842_A1-200 |
| | | | | | | | | (44.5% identity, 58.12% |
| | | | | | | | | similarity) |
| | | | | | | | | APG00483.0 |
| | | | | | | | | US_2016_0355842_A1-104 |
| | | | | | | | | (44.27% identity, 60.42% |
| | | | | | | | | similarity) |
| | | | | | | | | APG00414.0 |
| | | | | | | | | US_2016_0355842_A1-81 |
| | | | | | | | | (44.21% identity, 58.95% |
| | | | | | | | | similarity) |
| | | | | | | | | WP_063226258.1 (44.01% |
| | | | | | | | | identity, 58.59% similarity) |
| | | | | | | | | APG00475.0 |
| | | | | | | | | US_2016_0366881_A1-90 |
| | | | | | | | | (43.86% identity, 60.31% |
| | | | | | | | | similarity) |
| | | | | | | | | APG00486.0 |
| | | | | | | | | US_2016_0355842_A1-107 |
| | | | | | | | | (43.84% identity, 62.47% |
| | | | | | | | | similarity) |
| APG08056.0 | 267 | 268 | | | Bin | 5, 10, 15, 20, 25, 30, 35, 40, | 5, 10, 15, 20, 25, | WP_064302746.1 (78.12% |
| | | | | | | 45, 50, 55, 60, 65, 70, 75, 80, | 30, 35, 40, 45, | identity, 79.38% similarity) |
| | | | | | | 85, 90, 91, 92, 93, 94, 95, | 50, 55, 60, 65, 70, | WP_009403054.1 (77.5% |
| | | | | | | 96, 97, 98, 99, 100 | 75, 80, 85, 90, | identity, 79.38% similarity) |
| | | | | | | | 91, 92, 93, 94, | WP_048395098.1 (56.88% |
| | | | | | | | 95, 96, 97, 98, 99, | identity, 65.62% similarity) |
| | | | | | | | 100 | KHJ62256.1 (36.88% identity, |
| | | | | | | | | 50.62% similarity) |
| | | | | | | | | WP_081274436.1 (35.71% |
| | | | | | | | | identity, 47.62% similarity) |
| | | | | | | | | WP_015876201.1 (35.0% |
| | | | | | | | | identity, 46.25% similarity) |
| | | | | | | | | WP_085040093.1 (35.0% |
| | | | | | | | | identity, 46.25% similarity) |
| | | | | | | | | WP_059574313.1 (34.38% |
| | | | | | | | | identity, 44.38% similarity) |
| | | | | | | | | WP_060965848.1 (34.38% |
| | | | | | | | | identity, 43.75% similarity) |
| | | | | | | | | APG07643.0 (34.36% identity, |
| | | | | | | | | 44.17% similarity) |
| APG08101.0 | 269 | 270 | | | Bin | 65, 70, 75, 80, 85, 90, 91, 92, | 75, 80, 85, 90, 91, | APG00075.0 |
| | | | | | | 93, 94, 95, 96, 97, 98, 99, | 92, 93, 94, 95, | US_2016_0177333_A1-40 |
| | | | | | | 100 | 96, 97, 98, 99, | (60.78% identity, 72.62% |
| | | | | | | | 100 | similarity) |
| | | | | | | | | APG06401.0 (53.41% |
| | | | | | | | | identity, 64.91% similarity) |
| | | | | | | | | APG00750.0 |
| | | | | | | | | US_2016_0366881_A1-132 |
| | | | | | | | | (41.14% identity, 54.67% |
| | | | | | | | | similarity) |
| | | | | | | | | US_7692068_B2-2 (39.55% |
| | | | | | | | | identity, 52.24% similarity) |
| | | | | | | | | US_9567381_B2-398 (37.14% |
| | | | | | | | | identity, 52.0% similarity) |
| | | | | | | | | APG00063.0 |
| | | | | | | | | US_2016_0304898_A1-95 |
| | | | | | | | | (35.9% identity, 47.18% |
| | | | | | | | | similarity) |
| | | | | | | | | APG00706.0 (35.19% |
| | | | | | | | | identity, 49.44% similarity) |
| | | | | | | | | US_9567381_B2-394 (35.15% |
| | | | | | | | | identity, 47.54% similarity) |
| | | | | | | | | US_6555655_B1-14 (34.8% |
| | | | | | | | | identity, 47.25% similarity) |
| | | | | | | | | APG00734.0 |
| | | | | | | | | US_2016_0366881_A1-131 |
| | | | | | | | | (34.16% identity, 46.8% |
| | | | | | | | | similarity) |
| APG08265.0 | 271 | | | | Cry | 45, 50, 55, 60, 65, 70, 75, 80, | 65, 70, 75, 80, 85, | US_8461421_B2-268 (44.01% |
| | | | | | | 85, 90, 91, 92, 93, 94, 95, | 90, 91, 92, 93, | identity, 60.48% similarity) |
| | | | | | | 96, 97, 98, 99, 100 | 94, 95, 96, 97, | US_8461421_B2-266 (43.06% |
| | | | | | | | 98, 99, 100 | identity, 59.1% similarity) |
| | | | | | | | | US_8461421_B2-190 (42.25% |
| | | | | | | | | identity, 59.5% similarity) |
| | | | | | | | | APG00084.0 |
| | | | | | | | | US_2016_0311864_A1-15 |
| | | | | | | | | (41.93% identity, 56.97% |
| | | | | | | | | similarity) |
| | | | | | | | | US_8609937_B2-1 (41.64% |
| | | | | | | | | identity, 57.92% similarity) |
| | | | | | | | | US_8609937_B2-2 (41.64% |
| | | | | | | | | identity, 57.92% similarity) |
| | | | | | | | | APG07954.0 (41.5% identity, |
| | | | | | | | | 58.08% similarity) |
| | | | | | | | | US_8461421_B2-188 (41.09% |
| | | | | | | | | identity, 57.78% similarity) |
| | | | | | | | | EEM92570.1 (40.85% |
| | | | | | | | | identity, 57.1% similarity) |
| | | | | | | | | APG00965.0 (40.41% |
| | | | | | | | | identity, 55.62% similarity) |
| APG08298.0 | 272 | 273 | | | MTX | 50, 55, 60, 65, 70, 75, 80, 85, | 70, 75, 80, 85, 90, | APG05500.0 (49.38% |
| | | | | | | 90, 91, 92, 93, 94, 95, 96, | 91, 92, 93, 94, | identity, 68.83% similarity) |
| | | | | | | 97, 98, 99, 100 | 95, 96, 97, 98, | US_8513493_B2-5 (42.73% |
| | | | | | | | 99, 100 | identity, 60.24% similarity) |
| | | | | | | | | US_8513493_B2-10 (42.69% |
| | | | | | | | | identity, 59.94% similarity) |
| | | | | | | | | US_9322033_B2-186 (42.4% |
| | | | | | | | | identity, 60.23% similarity) |
| | | | | | | | | US_9322033_B2-1 (42.4% |
| | | | | | | | | identity, 59.94% similarity) |
| | | | | | | | | US_9322033_B2-187 (42.23% |
| | | | | | | | | identity, 59.53% similarity) |
| | | | | | | | | US_9322033_B2-46 (42.03% |
| | | | | | | | | identity, 58.55% similarity) |
| | | | | | | | | US_9322033_B2-48 (42.03% |
| | | | | | | | | identity, 58.55% similarity) |
| | | | | | | | | US_9322033_B2-49 (42.03% |
| | | | | | | | | identity, 58.55% similarity) |
| | | | | | | | | US_9322033_B2-50 (42.03% |
| | | | | | | | | identity, 58.26% similarity) |
| | | | | | | | | US_9322033_B2-76 (42.03% |
| | | | | | | | | identity, 58.26% similarity) |
| | | | | | | | | US_9322033_B2-106 (42.03% |
| | | | | | | | | identity, 57.97% similarity) |
| APG08348.0 | 274 | 275 | | | Bin | 40, 45, 50, 55, 60, 65, 70, 75, | 60, 65, 70, 75, 80, | APG07202.0 (62.7% identity, |
| | | | | | | 80, 85, 90, 91, 92, 93, 94, | 85, 90, 91, 92, | 74.34% similarity) |
| | | | | | | 95, 96, 97, 98, 99, 100 | 93, 94, 95, 96, | WP_042162506.1 (51.06% |
| | | | | | | | 97, 98, 99, 100 | identity, 63.03% similarity) |
| | | | | | | | | AKG37966.1 (49.46% identity, |
| | | | | | | | | 62.37% similarity) |
| | | | | | | | | WP_052756038.1 (49.33% |
| | | | | | | | | identity, 62.13% similarity) |
| | | | | | | | | APG00837.0 (39.84% |
| | | | | | | | | identity, 58.58% similarity) |
| | | | | | | | | APG00748.0 |
| | | | | | | | | US_2016_0311864_A1-214 |
| | | | | | | | | (39.14% identity, 56.57% |
| | | | | | | | | similarity) |
| | | | | | | | | WP_002016877.1 (38.95% |
| | | | | | | | | identity, 57.37% similarity) |
| | | | | | | | | APG00386.0 |
| | | | | | | | | US_2016_0311864_A1-158 |
| | | | | | | | | (38.68% identity, 54.21% |
| | | | | | | | | similarity) |
| | | | | | | | | WP_016097060.1 (38.16% |
| | | | | | | | | identity, 55.79% similarity) |
| | | | | | | | | WP_002167240.1 (37.83% |
| | | | | | | | | identity, 54.5% similarity) |
| APG08366.0 | 276 | | | | Cry6 | 95, 96, 97, 98, 99, 100 | 99, 100 | WP_000240776.1 (98.58% |
| | | | | | | | | identity, 99.15% similarity) |
| | | | | | | | | WP_000240775.1 (97.73% |
| | | | | | | | | identity, 98.3% similarity) |
| | | | | | | | | WP_061530442.1 (97.17% |
| | | | | | | | | identity, 98.87% similarity) |
| | | | | | | | | SFS89352.1 (97.17% identity, |
| | | | | | | | | 98.02% similarity) |
| | | | | | | | | WP_000240777.1 (96.6% |
| | | | | | | | | identity, 98.02% similarity) |
| | | | | | | | | WP_074651521.1 (96.32% |
| | | | | | | | | identity, 98.58% similarity) |
| | | | | | | | | WP_002187778.1 (96.03% |
| | | | | | | | | identity, 98.3% similarity) |
| | | | | | | | | WP_078205543.1 (96.03% |
| | | | | | | | | identity, 98.3% similarity) |
| | | | | | | | | WP_016078427.1 (96.03% |
| | | | | | | | | identity, 98.02% similarity) |
| | | | | | | | | WP_063549547.1 (96.03% |
| | | | | | | | | identity, 97.17% similarity) |
| | | | | | | | | US_8461421_B2-11 (94.63% |
| | | | | | | | | identity, 98.02% similarity) |
| | | | | | | | | US_8461421_B2-71 (94.63% |
| | | | | | | | | identity, 98.02% similarity) |
| | | | | | | | | APG00024.0 |
| | | | | | | | | US_2016_0304898_A1-39 |
| | | | | | | | | (94.43% identity, 96.38% |
| | | | | | | | | similarity) |
| | | | | | | | | APG00631.0 |
| | | | | | | | | US_2016_0366881_A1-127 |
| | | | | | | | | (94.05% identity, 97.73% |
| | | | | | | | | similarity) |
| APG08414.0 | 277 | 278 | | | Vip4 | 80, 85, 90, 91, 92, 93, 94, 95, | 90, 91, 92, 93, 94, | WP_053512697.1 (98.09% |
| | | | | | | 96, 97, 98, 99, 100 | 95, 96, 97, 98, | identity, 98.09% similarity) |
| | | | | | | | 99, 100 | SCL96146.1 (97.79% identity, |
| | | | | | | | | 97.79% similarity) |
| | | | | | | | | WP_048561796.1 (97.19% |
| | | | | | | | | identity, 97.59% similarity) |
| | | | | | | | | APG09545.0 (76.64% |
| | | | | | | | | identity, 85.98% similarity) |
| | | | | | | | | SCC38903.1 (74.95% identity, |
| | | | | | | | | 84.49% similarity) |
| | | | | | | | | OUB59180.1 (73.16% |
| | | | | | | | | identity, 82.8% similarity) |
| | | | | | | | | APG04931.0 (62.13% |
| | | | | | | | | identity, 73.39% similarity) |
| | | | | | | | | APG07526.0 (61.24% |
| | | | | | | | | identity, 73.6% similarity) |
| | | | | | | | | APG03791.0 (59.11% identity, |
| | | | | | | | | 69.95% similarity) |
| | | | | | | | | US_2016_0339078_A1-28124 |
| | | | | | | | | (59.01% identity, 69.75% |
| | | | | | | | | similarity) |
| APG08601.0 | 279 | 280, 281 | | | Cry | 80, 85, 90, 91, 92, 93, 94, 95, | 85, 90, 91, 92, 93, | WP_048536363.1 (85.23% |
| | | | | | | 96, 97, 98, 99, 100 | 94, 95, 96, 97, | identity, 85.23% similarity) |
| | | | | | | | 98, 99, 100 | APG00267.0 |
| | | | | | | | | US_2016_0311864_A1-106 |
| | | | | | | | | (77.54% identity, 81.69% |
| | | | | | | | | similarity) |
| | | | | | | | | APG00391.0 |
| | | | | | | | | US_2016_0311864_A1-160 |
| | | | | | | | | (75.69% identity, 80.92% |
| | | | | | | | | similarity) |
| | | | | | | | | APG00502.0 |
| | | | | | | | | US_2016_0366881_A1-97 |
| | | | | | | | | (75.69% identity, 80.15% |
| | | | | | | | | similarity) |
| | | | | | | | | APG00587.0 (39.2% identity, |
| | | | | | | | | 52.49% similarity) |
| | | | | | | | | APG00702.0 (29.12% |
| | | | | | | | | identity, 43.54% similarity) |
| | | | | | | | | APG01679.0 (26.23% identity, |
| | | | | | | | | 38.08% similarity) |
| | | | | | | | | WP_048536362.1 (26.23% |
| | | | | | | | | identity, 38.08% similarity) |
| | | | | | | | | CA_2844913-200 (25.98% |
| | | | | | | | | identity, 39.47% similarity) |
| | | | | | | | | APG00292.0 |
| | | | | | | | | US_2016_0311864_A1-126 |
| | | | | | | | | (25.53% identity, 36.81% |
| | | | | | | | | similarity) |
| APG08605.0 | 282 | 283 | | | MTX | 80, 85, 90, 91, 92, 93, 94, 95, | 90, 91, 92, 93, 94, | APG03638.0 (99.71% identity, |
| | | | | | | 96, 97, 98, 99, 100 | 95, 96, 97, 98, | 100.0% similarity) |
| | | | | | | | 99, 100 | OOR71217.1 (99.71% |
| | | | | | | | | identity, 100.0% similarity) |
| | | | | | | | | WP_078187960.1 (80.28% |
| | | | | | | | | identity, 80.51% similarity) |
| | | | | | | | | APG03848.0 (78.1% identity, |
| | | | | | | | | 85.88% similarity) |
| | | | | | | | | WP_075718639.1 (77.23% |
| | | | | | | | | identity, 84.73% similarity) |
| | | | | | | | | WP_075716873.1 (76.66% |
| | | | | | | | | identity, 84.15% similarity) |
| | | | | | | | | WP_078187232.1 (59.26% |
| | | | | | | | | identity, 65.93% similarity) |
| | | | | | | | | APG01197.0 (45.95% identity, |
| | | | | | | | | 50.97% similarity) |
| | | | | | | | | APG05787.0 (37.54% identity, |
| | | | | | | | | 52.66% similarity) |
| | | | | | | | | CA_2844913-116 (35.83% |
| | | | | | | | | identity, 40.11% similarity) |
| APG08681.0 | 284 | | | | Cry | 60, 65, 70, 75, 80, 85, 90, 91, | 70, 75, 80, 85, 90, | WP_048536324.1 (100.0% |
| | | | | | | 92, 93, 94, 95, 96, 97, 98, | 91, 92, 93, 94, | identity, 100.0% similarity) |
| | | | | | | 99, 100 | 95, 96, 97, 98, | APG00235.0 |
| | | | | | | | 99, 100 | US_2016_0311864_A1-89 |
| | | | | | | | | (57.14% identity, 66.88% |
| | | | | | | | | similarity) |
| | | | | | | | | WP_050845493.1 (53.16% |
| | | | | | | | | identity, 64.99% similarity) |
| | | | | | | | | APG00702.0 (43.52% |
| | | | | | | | | identity, 56.17% similarity) |
| | | | | | | | | APG00401.0 |
| | | | | | | | | US_2016_0311864_A1-168 |
| | | | | | | | | (39.15% identity, 53.14% |
| | | | | | | | | similarity) |
| | | | | | | | | APG00255.0 |
| | | | | | | | | US_2016_0311864_A1-98 |
| | | | | | | | | (38.45% identity, 53.48% |
| | | | | | | | | similarity) |
| | | | | | | | | APG00232.0 |
| | | | | | | | | US_2016_0311864_A1-87 |
| | | | | | | | | (36.5% identity, 48.81% |
| | | | | | | | | similarity) |
| | | | | | | | | APG06997.0 (34.83% |
| | | | | | | | | identity, 48.43% similarity) |
| | | | | | | | | APG00626.0 |
| | | | | | | | | US_2016_0366881_A1-124 |
| | | | | | | | | (34.8% identity, 49.77% |
| | | | | | | | | similarity) |
| | | | | | | | | APG07866.0 (30.75% |
| | | | | | | | | identity, 45.81% similarity) |
| APG08882.0 | 285 | 286 | | | MTX | 65, 70, 75, 80, 85, 90, 91, 92, | 75, 80, 85, 90, 91, | APG01858.0 (87.87% identity, |
| | | | | | | 93, 94, 95, 96, 97, 98, 99, | 92, 93, 94, 95, | 91.34% similarity) |
| | | | | | | 100 | 96, 97, 98, 99, | APG09211.0 (60.53% |
| | | | | | | | 100 | identity, 72.64% similarity) |
| | | | | | | | | APG00170.0 |
| | | | | | | | | US_2016_0355842_A1-13 |
| | | | | | | | | (58.27% identity, 68.59% |
| | | | | | | | | similarity) |
| | | | | | | | | APG00051.0 |
| | | | | | | | | US_2016_0304898_A1-81 |
| | | | | | | | | (56.32% identity, 69.69% |
| | | | | | | | | similarity) |
| | | | | | | | | APG09338.0 (56.25% |
| | | | | | | | | identity, 69.71% similarity) |
| | | | | | | | | APG00854.0 |
| | | | | | | | | US_2016_0355842_A1-179 |
| | | | | | | | | (56.16% identity, 67.73% |
| | | | | | | | | similarity) |
| | | | | | | | | APG00911.0 |
| | | | | | | | | US_2016_0355842_A1-189 |
| | | | | | | | | (53.56% identity, 66.09% |
| | | | | | | | | similarity) |
| | | | | | | | | US_8829279_B2-11 (53.27% |
| | | | | | | | | identity, 64.41% similarity) |
| | | | | | | | | APG06242.0 (52.28% |
| | | | | | | | | identity, 64.03% similarity) |
| | | | | | | | | APG00293.0 |
| | | | | | | | | US_2016_0355842_A1-51 |
| | | | | | | | | (51.46% identity, 63.11% |
| | | | | | | | | similarity) |
| APG08884.0 | 287 | 288 | 289 | | Cry | 45, 50, 55, 60, 65, 70, 75, 80, | 60, 65, 70, 75, 80, | APG00162.0 |
| | | | | | | 85, 90, 91, 92, 93, 94, 95, | 85, 90, 91, 92, | US_2016_0177333_A1-82 |
| | | | | | | 96, 97, 98, 99, 100 | 93, 94, 95, 96, | (43.91% identity, 58.23% |
| | | | | | | | 97, 98, 99, 100 | similarity) |
| | | | | | | | | APG00374.0 |
| | | | | | | | | US_2016_0366881_A1-40 |
| | | | | | | | | (42.72% identity, 58.63% |
| | | | | | | | | similarity) |
| | | | | | | | | CA_2516349-38 (38.89% |
| | | | | | | | | identity, 55.87% similarity) |
| | | | | | | | | AND28677.1 (38.89% |
| | | | | | | | | identity, 55.71% similarity) |
| | | | | | | | | US_6056953_A-28 (38.73% |
| | | | | | | | | identity, 55.56% similarity) |
| | | | | | | | | US_8865428_B2-88 (38.65% |
| | | | | | | | | identity, 55.71% similarity) |
| | | | | | | | | EP_0296870-2 (38.49% |
| | | | | | | | | identity, 55.63% similarity) |
| | | | | | | | | APG00326.0 (38.37% |
| | | | | | | | | identity, 54.01% similarity) |
| | | | | | | | | US_9567381_B2-411 (38.21% |
| | | | | | | | | identity, 54.39% similarity) |
| | | | | | | | | US_9567381_B2-413 (38.18% |
| | | | | | | | | identity, 54.95% similarity) |
| APG08917.0 | 290 | | | | MTX | 65, 70, 75, 80, 85, 90, 91, 92, | 75, 80, 85, 90, 91, | APG07780.0 (64.75% |
| | | | | | | 93, 94, 95, 96, 97, 98, 99, | 92, 93, 94, 95, | identity, 74.1% similarity) |
| | | | | | | 100 | 96, 97, 98, 99, | APG01706.0 (63.54% identity, |
| | | | | | | | 100 | 75.81% similarity) |
| | | | | | | | | APG01093.0 (57.76% identity, |
| | | | | | | | | 71.48% similarity) |
| | | | | | | | | APG01273.0 (56.54% |
| | | | | | | | | identity, 72.08% similarity) |
| | | | | | | | | WP_073006286.1 (29.49% |
| | | | | | | | | identity, 46.47% similarity) |
| APG08925.0 | 291 | 292 | | | MTX | 40, 45, 50, 55, 60, 65, 70, 75, | 60, 65, 70, 75, 80, | WP_084159262.1 (71.12% |
| | | | | | | 80, 85, 90, 91, 92, 93, 94, | 85, 90, 91, 92, | identity, 76.29% similarity) |
| | | | | | | 95, 96, 97, 98, 99, 100 | 93, 94, 95, 96, | WP_036122586.1 (41.08% |
| | | | | | | | 97, 98, 99, 100 | identity, 59.87% similarity) |
| | | | | | | | | KUF37510.1 (40.76% identity, |
| | | | | | | | | 58.92% similarity) |
| | | | | | | | | WP_010859436.1 (40.6% |
| | | | | | | | | identity, 56.42% similarity) |
| | | | | | | | | WP_002204230.1 (40.07% |
| | | | | | | | | identity, 58.61% similarity) |
| | | | | | | | | APG00489.0 |
| | | | | | | | | US_2016_0177333_A1-123 |
| | | | | | | | | (39.94% identity, 57.66% |
| | | | | | | | | similarity) |
| | | | | | | | | APG00010.0 |
| | | | | | | | | US_2016_0177333_A1-8 |
| | | | | | | | | (39.7% identity, 57.31% |
| | | | | | | | | similarity) |
| | | | | | | | | WP_082673669.1 (39.7% |
| | | | | | | | | identity, 57.31% similarity) |
| | | | | | | | | US_7919272_B2-21 (39.1% |
| | | | | | | | | identity, 57.37% similarity) |
| | | | | | | | | WP_000735751.1 (39.1% |
| | | | | | | | | identity, 57.05% similarity) |
| APG09069.0 | 293 | | | | Bin | 90, 91, 92, 93, 94, 95, 96, 97, | 92, 93, 94, 95, 96, | APG06920.0 (85.9% identity, |
| | | | | | | 98, 99, 100 | 97, 98, 99, 100 | 89.89% similarity) |
| | | | | | | | | APG00413.0 |
| | | | | | | | | US_2016_0311864_A1-174 |
| | | | | | | | | (85.87% identity, 91.2% |
| | | | | | | | | similarity) |
| | | | | | | | | KEZ80012.1 (81.87% identity, |
| | | | | | | | | 89.33% similarity) |
| | | | | | | | | APG00230.0 |
| | | | | | | | | US_2016_0311864_A1-85 |
| | | | | | | | | (78.63% identity, 87.86% |
| | | | | | | | | similarity) |
| | | | | | | | | US_9321814_B2-3 (78.4% |
| | | | | | | | | identity, 86.4% similarity) |
| | | | | | | | | US_9321814_B2-2 (78.19% |
| | | | | | | | | identity, 86.17% similarity) |
| | | | | | | | | US_9321814_B2-4 (76.8% |
| | | | | | | | | identity, 84.8% similarity) |
| | | | | | | | | US_9321814_B2-5 (76.0% |
| | | | | | | | | identity, 84.0% similarity) |
| | | | | | | | | WP_017154552.1 (72.03% |
| | | | | | | | | identity, 82.32% similarity) |
| | | | | | | | | APG03279.0 (70.13% |
| | | | | | | | | identity, 80.0% similarity) |
| APG09110.0 | 294 | 295, 296 | | | MTX | 85, 90, 91, 92, 93, 94, 95, 96, | 91, 92, 93, 94, 95, | WP_051889583.1 (92.13% |
| | | | | | | 97, 98, 99, 100 | 96, 97, 98, 99, | identity, 93.54% similarity) |
| | | | | | | | 100 | APG03947.0 (84.08% |
| | | | | | | | | identity, 90.5% similarity) |
| | | | | | | | | ACA38725.1 (83.8% identity, |
| | | | | | | | | 90.5% similarity) |
| | | | | | | | | WP_051563179.1 (81.84% |
| | | | | | | | | identity, 87.71% similarity) |
| | | | | | | | | WP_051800214.1 (81.84% |
| | | | | | | | | identity, 87.71% similarity) |
| | | | | | | | | WP_051889585.1 (81.56% |
| | | | | | | | | identity, 87.71% similarity) |
| | | | | | | | | WP_051891081.1 (81.56% |
| | | | | | | | | identity, 87.71% similarity) |
| | | | | | | | | APG02401.0 (46.96% identity, |
| | | | | | | | | 61.88% similarity) |
| | | | | | | | | WP_018673409.1 (46.96% |
| | | | | | | | | identity, 61.88% similarity) |
| | | | | | | | | APG00585.0 |
| | | | | | | | | US_2016_0366881_A1-116 |
| | | | | | | | | (45.88% identity, 60.71% |
| | | | | | | | | similarity) |
| APG09112.0 | 297 | 298, 299 | | | Cry | 30, 35, 40, 45, 50, 55, 60, 65, | 45, 50, 55, 60, 65, | APG00702.0 (27.89% |
| | | | | | | 70, 75, 80, 85, 90, 91, 92, | 70, 75, 80, 85, | identity, 43.51% similarity) |
| | | | | | | 93, 94, 95, 96, 97, 98, 99, 100 | 90, 91, 92, 93, | APG00255.0 |
| | | | | | | | 94, 95, 96, 97, 98, | US_2016_0311864_A1-98 |
| | | | | | | | 99, 100 | (26.81% identity, 39.44% |
| | | | | | | | | similarity) |
| | | | | | | | | APG00401.0 |
| | | | | | | | | US_2016_0311864_A1-168 |
| | | | | | | | | (26.66% identity, 39.92% |
| | | | | | | | | similarity) |
| | | | | | | | | APG00302.0 |
| | | | | | | | | US_2016_0311864_A1-132 |
| | | | | | | | | (25.46% identity, 39.26% |
| | | | | | | | | similarity) |
| | | | | | | | | APG00446.0 |
| | | | | | | | | US_2016_0366881_A1-68 |
| | | | | | | | | (25.39% identity, 38.93% |
| | | | | | | | | similarity) |
| | | | | | | | | APG00334.0 |
| | | | | | | | | US_2016_0366881_A1-17 |
| | | | | | | | | (25.21% identity, 37.19% |
| | | | | | | | | similarity) |
| | | | | | | | | APG00396.0 |
| | | | | | | | | US_2016_0311864_A1-163 |
| | | | | | | | | (25.03% identity, 35.84% |
| | | | | | | | | similarity) |
| APG09146.0 | 300 | 301 | | | Bin | 35, 40, 45, 50, 55, 60, 65, 70, | 50, 55, 60, 65, 70, | WP_016099737.1 (37.03% |
| | | | | | | 75, 80, 85, 90, 91, 92, 93, | 75, 80, 85, 90, | identity, 50.19% similarity) |
| | | | | | | 94, 95, 96, 97, 98, 99, 100 | 91, 92, 93, 94, | APG08101.0 (33.77% identity, |
| | | | | | | | 95, 96, 97, 98, 99, | 48.03% similarity) |
| | | | | | | | 100 | APG00075.0 |
| | | | | | | | | US_2016_0177333_A1-40 |
| | | | | | | | | (33.39% identity, 45.76% |
| | | | | | | | | similarity) |
| | | | | | | | | APG06401.0 (33.08% |
| | | | | | | | | identity, 46.15% similarity) |
| | | | | | | | | US_8461415_B2-44 (31.87% |
| | | | | | | | | identity, 46.71% similarity) |
| | | | | | | | | US_8461415_B2-44 (31.87% |
| | | | | | | | | identity, 46.71% similarity) |
| | | | | | | | | US_8461415_B2-29 (30.67% |
| | | | | | | | | identity, 44.65% similarity) |
| | | | | | | | | APG00734.0 |
| | | | | | | | | US_2016_0366881_A1-131 |
| | | | | | | | | (30.49% identity, 44.28% |
| | | | | | | | | similarity) |
| | | | | | | | | US_7692068_B2-2 (29.67% |
| | | | | | | | | identity, 46.44% similarity) |
| | | | | | | | | APG00706.0 (29.31% |
| | | | | | | | | identity, 43.49% similarity) |
| APG09153.0 | 302 | | | | Bin | 80, 85, 90, 91, 92, 93, 94, 95, | 90, 91, 92, 93, 94, | APG08195.0 (78.05% |
| | | | | | | 96, 97, 98, 99, 100 | 95, 96, 97, 98, | identity, 86.59% similarity) |
| | | | | | | | 99, 100 | APG07868.0 (77.32% |
| | | | | | | | | identity, 85.85% similarity) |
| | | | | | | | | APG00178.0 |
| | | | | | | | | US_2016_0311864_A1-54 |
| | | | | | | | | (76.83% identity, 85.12% |
| | | | | | | | | similarity) |
| | | | | | | | | APG00727.0 |
| | | | | | | | | US_2016_0311864_A1-210 |
| | | | | | | | | (76.34% identity, 84.15% |
| | | | | | | | | similarity) |
| | | | | | | | | APG00315.0 |
| | | | | | | | | US_2016_0311864_A1-137 |
| | | | | | | | | (74.51% identity, 85.05% |
| | | | | | | | | similarity) |
| | | | | | | | | APG00729.0 (28.54% |
| | | | | | | | | identity, 42.26% similarity) |
| | | | | | | | | APG01153.0 (28.34% identity, |
| | | | | | | | | 41.94% similarity) |
| | | | | | | | | APG00629.0 |
| | | | | | | | | US_2016_0366881_A1-126 |
| | | | | | | | | (28.15% identity, 42.44% |
| | | | | | | | | similarity) |
| | | | | | | | | APG00215.0 |
| | | | | | | | | US_2016_0311864_A1-78 |
| | | | | | | | | (28.0% identity, 44.47% |
| | | | | | | | | similarity) |
| | | | | | | | | APG00880.0 |
| | | | | | | | | US_2016_0366881_A1-134 |
| | | | | | | | | (27.99% identity, 46.65% |
| | | | | | | | | similarity) |
| APG09293.0 | 303 | | | | Vip4 | 70, 75, 80, 85, 90, 91, 92, 93, | 85, 90, 91, 92, 93, | APG00106.0 |
| | | | | | | 94, 95, 96, 97, 98, 99, 100 | 94, 95, 96, 97, | US_2016_0304898_A1-134 |
| | | | | | | | 98, 99, 100 | (68.38% identity, 80.34% |
| | | | | | | | | similarity) |
| | | | | | | | | US_2017_0044568_A1-2 |
| | | | | | | | | (67.98% identity, 77.93% |
| | | | | | | | | similarity) |
| | | | | | | | | APG09984.0 (67.7% identity, |
| | | | | | | | | 80.38% similarity) |
| | | | | | | | | APG02278.0 (67.13% identity, |
| | | | | | | | | 79.23% similarity) |
| | | | | | | | | US_2016_0339078_A1-28464 |
| | | | | | | | | (64.25% identity, 76.87% |
| | | | | | | | | similarity) |
| | | | | | | | | SCC34829.1 (62.36% identity, |
| | | | | | | | | 75.08% similarity) |
| | | | | | | | | APG01927.0 (61.59% |
| | | | | | | | | identity, 73.17% similarity) |
| | | | | | | | | APG07526.0 (56.47% |
| | | | | | | | | identity, 72.48% similarity) |
| | | | | | | | | AGT29561.1 (55.37% identity, |
| | | | | | | | | 68.3% similarity) |
| | | | | | | | | APG04931.0 (54.54% |
| | | | | | | | | identity, 70.06% similarity) |
| APG09427.0 | 304 | 305 | | | MTX | 50, 55, 60, 65, 70, 75, 80, 85, | 65, 70, 75, 80, 85, | APG00254.0 |
| | | | | | | 90, 91, 92, 93, 94, 95, 96, | 90, 91, 92, 93, | US_2016_0355842_A1-40 |
| | | | | | | 97, 98, 99, 100 | 94, 95, 96, 97, | (49.12% identity, 54.71% |
| | | | | | | | 98, 99, 100 | similarity) |
| | | | | | | | | US_8461421_B2-117 (46.29% |
| | | | | | | | | identity, 63.43% similarity) |
| | | | | | | | | EEM86552.1 (46.0% identity, |
| | | | | | | | | 63.14% similarity) |
| | | | | | | | | APG00552.0 |
| | | | | | | | | US_2016_0366881_A1-110 |
| | | | | | | | | (44.99% identity, 62.75% |
| | | | | | | | | similarity) |
| | | | | | | | | WP_061885189.1 (44.73% |
| | | | | | | | | identity, 62.68% similarity) |
| | | | | | | | | OTY48309.1 (44.44% identity, |
| | | | | | | | | 62.39% similarity) |
| | | | | | | | | WP_036654376.1 (42.57% |
| | | | | | | | | identity, 58.0% similarity) |
| | | | | | | | | APG08369.0 (42.21% |
| | | | | | | | | identity, 61.19% similarity) |
| | | | | | | | | APG00896.0 |
| | | | | | | | | US_2016_0355842_A1-185 |
| | | | | | | | | (41.98% identity, 57.43% |
| | | | | | | | | similarity) |
| | | | | | | | | APG00541.0 |
| | | | | | | | | US_2016_0355842_A1-119 |
| | | | | | | | | (41.57% identity, 59.88% |
| | | | | | | | | similarity) |
| | | | | | | | | APG00509.0 |
| | | | | | | | | US_2016_0355842_A1-113 |
| | | | | | | | | (41.57% identity, 59.59% |
| | | | | | | | | similarity) |
| APG09469.0 | 306 | 307, 308 | | | MTX | 93, 94, 95, 96, 97, 98, 99, 100 | 96, 97, 98, 99, 100 | APG00994.0 |
| | | | | | | | | US_2016_0355842_A1-198 |
| | | | | | | | | (92.31% identity, 95.05% |
| | | | | | | | | similarity) |
| | | | | | | | | AQM56946.1 (92.03% |
| | | | | | | | | identity, 93.68% similarity) |
| | | | | | | | | APG05791.0 (58.24% |
| | | | | | | | | identity, 73.63% similarity) |
| | | | | | | | | APG00429.0 |
| | | | | | | | | US_2016_0366881_A1-53 |
| | | | | | | | | (57.42% identity, 73.08% |
| | | | | | | | | similarity) |
| | | | | | | | | APG03889.0 (57.22% |
| | | | | | | | | identity, 71.66% similarity) |
| | | | | | | | | APG03067.0 (56.95% |
| | | | | | | | | identity, 70.86% similarity) |
| | | | | | | | | APG02557.0 (56.15% |
| | | | | | | | | identity, 70.59% similarity) |
| | | | | | | | | SDW10871.1 (26.45% |
| | | | | | | | | identity, 38.54% similarity) |
| APG09512.0 | 309 | | | | Cry | 50, 55, 60, 65, 70, 75, 80, 85, | 60, 65, 70, 75, 80, | APG06997.0 (48.09% |
| | | | | | | 90, 91, 92, 93, 94, 95, 96, | 85, 90, 91, 92, | identity, 57.55% similarity) |
| | | | | | | 97, 98, 99, 100 | 93, 94, 95, 96, | APG08681.0 (29.28% identity, |
| | | | | | | | 97, 98, 99, 100 | 44.41% similarity) |
| | | | | | | | | WP_048536324.1 (29.28% |
| | | | | | | | | identity, 44.41% similarity) |
| | | | | | | | | APG00626.0 |
| | | | | | | | | US_2016_0366881_A1-124 |
| | | | | | | | | (26.55% identity, 39.27% |
| | | | | | | | | similarity) |
| | | | | | | | | WP_050845493.1 (25.48% |
| | | | | | | | | identity, 39.86% similarity) |
| APG09572.0 | 310 | 311 | | | MTX | 85, 90, 91, 92, 93, 94, 95, 96, | 90, 91, 92, 93, 94, | APG03867.0 (82.13% |
| | | | | | | 97, 98, 99, 100 | 95, 96, 97, 98, | identity, 88.09% similarity) |
| | | | | | | | 99, 100 | APG03227.0 (80.19% |
| | | | | | | | | identity, 88.05% similarity) |
| | | | | | | | | APG04037.0 (78.19% identity, |
| | | | | | | | | 84.74% similarity) |
| | | | | | | | | APG00143.0 |
| | | | | | | | | US_2016_0355842_A1-4 |
| | | | | | | | | (65.43% identity, 77.78% |
| | | | | | | | | similarity) |
| | | | | | | | | APG00444.0 |
| | | | | | | | | US_2016_0355842_A1-93 |
| | | | | | | | | (65.02% identity, 77.71% |
| | | | | | | | | similarity) |
| | | | | | | | | APG00441.0 |
| | | | | | | | | US_2016_0355842_A1-91 |
| | | | | | | | | (64.71% identity, 77.4% |
| | | | | | | | | similarity) |
| | | | | | | | | APG07682.0 (62.39% |
| | | | | | | | | identity, 73.7% similarity) |
| | | | | | | | | APG00833.0 |
| | | | | | | | | US_2016_0355842_A1-175 |
| | | | | | | | | (61.28% identity, 76.22% |
| | | | | | | | | similarity) |
| | | | | | | | | APG09602.0 (58.49% identity, |
| | | | | | | | | 71.38% similarity) |
| | | | | | | | | WP_065845806.1 (58.49% |
| | | | | | | | | identity, 71.38% similarity) |
| APG09602.0 | 312 | 313 | | | MTX | 65, 70, 75, 80, 85, 90, 91, 92, | 75, 80, 85, 90, 91, | WP_065845806.1 (100.0% |
| | | | | | | 93, 94, 95, 96, 97, 98, 99, | 92, 93, 94, 95, | identity, 100.0% similarity) |
| | | | | | | 100 | 96, 97, 98, 99, | APG00143.0 |
| | | | | | | | 100 | US_2016_0355842_A1-4 |
| | | | | | | | | (61.66% identity, 73.93% |
| | | | | | | | | similarity) |
| | | | | | | | | APG00441.0 |
| | | | | | | | | US_2016_0355842_A1-91 |
| | | | | | | | | (61.04% identity, 73.01% |
| | | | | | | | | similarity) |
| | | | | | | | | APG00444.0 |
| | | | | | | | | US_2016_0355842_A1-93 |
| | | | | | | | | (61.04% identity, 72.7% |
| | | | | | | | | similarity) |
| | | | | | | | | APG00833.0 |
| | | | | | | | | US_2016_0355842_A1-175 |
| | | | | | | | | (60.55% identity, 72.17% |
| | | | | | | | | similarity) |
| | | | | | | | | APG03867.0 (58.64% |
| | | | | | | | | identity, 72.53% similarity) |
| | | | | | | | | APG03227.0 (58.51% |
| | | | | | | | | identity, 71.52% similarity) |
| | | | | | | | | APG09572.0 (58.49% identity, |
| | | | | | | | | 71.38% similarity) |
| | | | | | | | | APG07682.0 (58.13% |
| | | | | | | | | identity, 68.98% similarity) |
| | | | | | | | | APG04037.0 (57.06% identity, |
| | | | | | | | | 70.55% similarity) |
| APG09620.0 | 314 | | | | MTX | 85, 90, 91, 92, 93, 94, 95, 96, | 91, 92, 93, 94, 95, | APG01996.0 (81.16% |
| | | | | | | 97, 98, 99, 100 | 96, 97, 98, 99, | identity, 90.22% similarity) |
| | | | | | | | 100 | APG02633.0 (34.16% |
| | | | | | | | | identity, 50.53% similarity) |
| APG09668.0 | 315 | | | | Cry | 30, 35, 40, 45, 50, 55, 60, 65, | 45, 50, 55, 60, 65, | WP_081097654.1 (26.37% |
| | | | | | | 70, 75, 80, 85, 90, 91, 92, | 70, 75, 80, 85, | identity, 43.14% similarity) |
| | | | | | | 93, 94, 95, 96, 97, 98, 99, 100 | 90, 91, 92, 93, | APG00113.0 |
| | | | | | | | 94, 95, 96, 97, 98, | US_2016_0311864_A1-24 |
| | | | | | | | 99, 100 | (26.18% identity, 43.0% |
| | | | | | | | | similarity) |
| | | | | | | | | APG00452.0 |
| | | | | | | | | US_2016_0366881_A1-73 |
| | | | | | | | | (25.87% identity, 42.33% |
| | | | | | | | | similarity) |
| | | | | | | | | APG00196.0 |
| | | | | | | | | US_2016_0311864_A1-66 |
| | | | | | | | | (25.71% identity, 41.12% |
| | | | | | | | | similarity) |
| APG09719.0 | 316 | 317, 318 | | | MTX | 45, 50, 55, 60, 65, 70, 75, 80, | 60, 65, 70, 75, 80, | WP_025188414.1 (43.01% |
| | | | | | | 85, 90, 91, 92, 93, 94, 95, | 85, 90, 91, 92, | identity, 60.75% similarity) |
| | | | | | | 96, 97, 98, 99, 100 | 93, 94, 95, 96, | EFT94981.1 (41.85% identity, |
| | | | | | | | 97, 98, 99, 100 | 59.51% similarity) |
| | | | | | | | | APG04099.0 (41.42% |
| | | | | | | | | identity, 59.89% similarity) |
| | | | | | | | | WP_075320440.1 (34.32% |
| | | | | | | | | identity, 57.03% similarity) |
| | | | | | | | | WP_010761370.1 (34.22% |
| | | | | | | | | identity, 55.35% similarity) |
| | | | | | | | | APG00522.0 |
| | | | | | | | | US_2016_0355842_A1-116 |
| | | | | | | | | (34.21% identity, 48.16% |
| | | | | | | | | similarity) |
| | | | | | | | | WP_068161155.1 (33.94% |
| | | | | | | | | identity, 53.89% similarity) |
| | | | | | | | | APG09735.0 (33.66% |
| | | | | | | | | identity, 48.27% similarity) |
| | | | | | | | | WP_010734336.1 (33.51% |
| | | | | | | | | identity, 53.46% similarity) |
| | | | | | | | | APG09642.0 (27.42% |
| | | | | | | | | identity, 45.17% similarity) |
| APG09750.0 | 319 | | | | Cry | 30, 35, 40, 45, 50, 55, 60, 65, | 45, 50, 55, 60, 65, | WP_025143599.1 (99.12% |
| | | | | | | 70, 75, 80, 85, 90, 91, 92, | 70, 75, 80, 85, | identity, 99.34% similarity) |
| | | | | | | 93, 94, 95, 96, 97, 98, 99, 100 | 90, 91, 92, 93, | APG05978.0 (25.31% |
| | | | | | | | 94, 95, 96, 97, 98, | identity, 43.98% similarity) |
| | | | | | | | 99, 100 | WP_084765780.1 (25.21% |
| | | | | | | | | identity, 43.96% similarity) |
| APG09770.0 | 320 | 321, 322 | | | MTX | 90, 91, 92, 93, 94, 95, 96, 97, | 91, 92, 93, 94, 95, | WP_016084436.1 (93.41% |
| | | | | | | 98, 99, 100 | 96, 97, 98, 99 | identity, 93.41% similarity) |
| | | | | | | | 100 | WP_016085279.1 (92.55% |
| | | | | | | | | identity, 93.12% similarity) |
| | | | | | | | | WP_016083901.1 (91.98% |
| | | | | | | | | identity, 92.55% similarity) |
| | | | | | | | | APG05337.0 (88.54% |
| | | | | | | | | identity, 90.26% similarity) |
| | | | | | | | | WP_050845726.1 (88.54% |
| | | | | | | | | identity, 90.26% similarity) |
| | | | | | | | | APG04806.0 (88.54% |
| | | | | | | | | identity, 89.68% similarity) |
| | | | | | | | | OUB25269.1 (88.25% |
| | | | | | | | | identity, 89.97% similarity) |
| | | | | | | | | WP_000823322.1 (88.25% |
| | | | | | | | | identity, 89.97% similarity) |
| | | | | | | | | APG02293.0 (87.68% |
| | | | | | | | | identity, 89.4% similarity) |
| | | | | | | | | APG07936.0 (86.82% |
| | | | | | | | | identity, 89.11% similarity) |
| | | | | | | | | WP_016084062.1 (86.82% |
| | | | | | | | | identity, 89.11% similarity) |
| | | | | | | | | WP_016084449.1 (86.82% |
| | | | | | | | | identity, 89.11% similarity) |
| APG09794.0 | 323 | 324, 325 | | | Cry | 40, 45, 50, 55, 60, 65, 70, 75, | 55, 60, 65, 70, 75, | US_8318900_B2-205 (39.23% |
| | | | | | | 80, 85, 90, 91, 92, 93, 94, | 80, 85, 90, 91, | identity, 52.14% similarity) |
| | | | | | | 95, 96, 97, 98, 99, 100 | 92, 93, 94, 95, | US_8318900_B2-205 (39.23% |
| | | | | | | | 96, 97, 98, 99, 100 | identity, 52.14% similarity) |
| | | | | | | | | APG00672.0 (38.77% |
| | | | | | | | | identity, 51.89% similarity) |
| | | | | | | | | APG00672.0 (38.77% |
| | | | | | | | | identity, 51.89% similarity) |
| | | | | | | | | APG00045.0 |
| | | | | | | | | US_2016_0304898_A1-73 |
| | | | | | | | | (38.65% identity, 51.11% |
| | | | | | | | | similarity) |
| | | | | | | | | APG00045.0 |
| | | | | | | | | US_2016_0304898_A1-73 |
| | | | | | | | | (38.65% identity, 51.11% |
| | | | | | | | | similarity) |
| | | | | | | | | APG00045.0 |
| | | | | | | | | US_2016_0304898_A1-73 |
| | | | | | | | | (38.65% identity, 51.11% |
| | | | | | | | | similarity) |
| | | | | | | | | APG01742.0 (38.14% |
| | | | | | | | | identity, 51.28% similarity) |
| | | | | | | | | APG01742.0 (38.14% |
| | | | | | | | | identity, 51.28% similarity) |
| | | | | | | | | APG01644.0 (37.26% |
| | | | | | | | | identity, 50.45% similarity) |
| | | | | | | | | APG01644.0 (37.26% |
| | | | | | | | | identity, 50.45% similarity) |
| | | | | | | | | APG01644.0 (37.26% |
| | | | | | | | | identity, 50.45% similarity) |
| APG09805.0 | 326 | 327 | | | Cry | 65, 70, 75, 80, 85, 90, 91, 92, | 75, 80, 85, 90, 91, | APG00222.0 |
| | | | | | | 93, 94, 95, 96, 97, 98, 99, | 92, 93, 94, 95, | US_2016_0304898_A1-203 |
| | | | | | | 100 | 96, 97, 98, 99, | (61.29% identity, 73.68% |
| | | | | | | | 100 | similarity) |
| | | | | | | | | CA_2844913-48 (59.42% |
| | | | | | | | | identity, 71.62% similarity) |
| | | | | | | | | WP_078205749.1 (59.4% |
| | | | | | | | | identity, 69.32% similarity) |
| | | | | | | | | APG06942.0 (58.02% |
| | | | | | | | | identity, 69.72% similarity) |
| | | | | | | | | AEH76820.1 (53.44% identity, |
| | | | | | | | | 67.07% similarity) |
| | | | | | | | | APG00912.0 (50.98% |
| | | | | | | | | identity, 65.28% similarity) |
| | | | | | | | | CA_2754845-8 (49.79% |
| | | | | | | | | identity, 62.48% similarity) |
| | | | | | | | | APG04350.0 (48.0% identity, |
| | | | | | | | | 60.96% similarity) |
| | | | | | | | | WP_078205753.1 (46.79% |
| | | | | | | | | identity, 58.67% similarity) |
| | | | | | | | | US_8461421_B2-75 (46.61% |
| | | | | | | | | identity, 59.76% similarity) |
| APG09876.0 | 328 | | | | MTX | 90, 91, 92, 93, 94, 95, 96, 97, | 95, 96, 97, 98, 99, | APG04598.0 (89.11% |
| | | | | | | 98, 99, 100 | 100 | identity, 94.72% similarity) |
| | | | | | | | | APG06465.0 (81.97% |
| | | | | | | | | identity, 92.79% similarity) |
| | | | | | | | | APG08138.0 (81.31% |
| | | | | | | | | identity, 92.46% similarity) |
| | | | | | | | | APG04483.0 (80.98% |
| | | | | | | | | identity, 92.46% similarity) |
| | | | | | | | | APG00696.0 |
| | | | | | | | | US_2016_0355842_A1-160 |
| | | | | | | | | (80.33% identity, 91.8% |
| | | | | | | | | similarity) |
| | | | | | | | | APG01882.0 (79.74% |
| | | | | | | | | identity, 91.5% similarity) |
| | | | | | | | | APG01265.0 (79.67% |
| | | | | | | | | identity, 92.46% similarity) |
| | | | | | | | | OUB46341.1 (79.67% |
| | | | | | | | | identity, 91.8% similarity) |
| | | | | | | | | APG03715.0 (76.25% |
| | | | | | | | | identity, 87.81% similarity) |
| | | | | | | | | OTX35277.1 (75.86% identity, |
| | | | | | | | | 86.83% similarity) |
| APG09904.0 | 329 | | | | MTX | 80, 85, 90, 91, 92, 93, 94, 95, | 90, 91, 92, 93, 94, | APG00850.0 |
| | | | | | | 96, 97, 98, 99, 100 | 95, 96, 97, 98, | US_2016_0355842_A1-178 |
| | | | | | | | 99, 100 | (76.43% identity, 86.79% |
| | | | | | | | | similarity) |
| | | | | | | | | APG00021.0 |
| | | | | | | | | US_2016_0304898_A1-35 |
| | | | | | | | | (71.43% identity, 84.29% |
| | | | | | | | | similarity) |
| | | | | | | | | APG03891.0 (71.07% |
| | | | | | | | | identity, 83.57% similarity) |
| | | | | | | | | APG00601.0 |
| | | | | | | | | US_2016_0355842_A1-141 |
| | | | | | | | | (70.71% identity, 83.21% |
| | | | | | | | | similarity) |
| | | | | | | | | APG03249.0 (70.71% |
| | | | | | | | | identity, 83.21% similarity) |
| | | | | | | | | US_8461421_B2-74 (70.0% |
| | | | | | | | | identity, 83.93% similarity) |
| | | | | | | | | APG00091.0 |
| | | | | | | | | US_2016_0304898_A1-120 |
| | | | | | | | | (69.64% identity, 82.14% |
| | | | | | | | | similarity) |
| | | | | | | | | APG02277.0 (50.53% identity, |
| | | | | | | | | 68.33% similarity) |
| | | | | | | | | US_2015_0047076_A1-10 |
| | | | | | | | | (29.77% identity, 45.82% |
| | | | | | | | | similarity) |
| | | | | | | | | US_2015_0047076_A1-6 |
| | | | | | | | | (28.87% identity, 46.05% |
| | | | | | | | | similarity) |
| APG09957.0 | 330 | 331 | | | MTX | 40, 45, 50, 55, 60, 65, 70, 75, | 55, 60, 65, 70, 75, | APG02633.0 (36.1% identity, |
| | | | | | | 80, 85, 90, 91, 92, 93, 94, | 80, 85, 90, 91, | 53.35% similarity) |
| | | | | | | 95, 96, 97, 98, 99, 100 | 92, 93, 94, 95, | |
| | | | | | | | 96, 97, 98, 99, 100 | |
| APG01045.0 | 332 | 333 | | | Cry | 40, 45, 50, 55, 60, 65, 70, 75, | 50, 55, 60, 65, 70, | APG05056.0 (96.04% |
| | | | | | | 80, 85, 90, 91, 92, 93, 94, | 75, 80, 85, 90, | identity, 97.83% similarity) |
| | | | | | | 95, 96, 97, 98, 99, 100 | 91, 92, 93, 94, | |
| | | | | | | | 95, 96, 97, 98, 99, | |
| | | | | | | | 100 | |
| | | | | | | | | APG01261.0 (35.34% |
| | | | | | | | | identity, 51.45% similarity) |
| | | | | | | | | WP_006925513.1 (35.34% |
| | | | | | | | | identity, 51.45% similarity) |
| | | | | | | | | APG00057.0 |
| | | | | | | | | US_2016_0304898_A1-88 |
| | | | | | | | | (35.32% identity, 49.39% |
| | | | | | | | | similarity) |
| | | | | | | | | WP_006927245.1 (35.16% |
| | | | | | | | | identity, 49.7% similarity) |
| | | | | | | | | APG00086.0 |
| | | | | | | | | US_2016_0304898_A1-113 |
| | | | | | | | | (30.12% identity, 44.64% |
| | | | | | | | | similarity) |
| | | | | | | | | WP_006922195.1 (30.06% |
| | | | | | | | | identity, 45.63% similarity) |
| | | | | | | | | APG07751.0 (29.63% |
| | | | | | | | | identity, 44.98% similarity) |
| | | | | | | | | APG00122.0 |
| | | | | | | | | US_2016_0304898_A1-143 |
| | | | | | | | | (29.16% identity, 44.98% |
| | | | | | | | | similarity) |
| | | | | | | | | APG04689.0 (28.94% |
| | | | | | | | | identity, 44.48% similarity) |
| | | | | | | | | WP_006919322.1 (28.94% |
| | | | | | | | | identity, 44.48% similarity) |
| APG02717.0 | 334 | | | | Cry | 85, 90, 91, 92, 93, 94, 95, 96, | 92, 93, 94, 95, 96, | APG02299.0 (96.18% |
| | | | | | | 97, 98, 99, 100 | 97, 98, 99, 100 | identity, 97.79% similarity) |
| | | | | | | | | CA_2844913-32 (84.88% |
| | | | | | | | | identity, 91.19% similarity) |
| | | | | | | | | APG00581.0 |
| | | | | | | | | US_2016_0355842_A1-133 |
| | | | | | | | | (45.23% identity, 59.67% |
| | | | | | | | | similarity) |
| | | | | | | | | US_8461421_B2-204 (42.44% |
| | | | | | | | | identity, 56.77% similarity) |
| | | | | | | | | US_9567381_B2-376 (41.41% |
| | | | | | | | | identity, 54.24% similarity) |
| | | | | | | | | US_8461421_B2-226 (40.57% |
| | | | | | | | | identity, 55.26% similarity) |
| | | | | | | | | US_8461421_B2-105 (40.46% |
| | | | | | | | | identity, 55.11% similarity) |
| | | | | | | | | US_8461421_B2-45 (40.46% |
| | | | | | | | | identity, 55.11% similarity) |
| | | | | | | | | US_9567381_B2-375 (37.63% |
| | | | | | | | | identity, 50.64% similarity) |
| | | | | | | | | APG00897.0 |
| | | | | | | | | US_2016_0355842_A1-186 |
| | | | | | | | | (34.76% identity, 49.47% |
| | | | | | | | | similarity) |
| APG03377.0 | 335 | 336 | | | MTX | 55, 60, 65, 70, 75, 80, 85, 90, | 65, 70, 75, 80, 85, | APG09427.0 (94.71% |
| | | | | | | 91, 92, 93, 94, 95, 96, 97, | 90, 91, 92, 93, | identity, 95.0% similarity) |
| | | | | | | 98, 99, 100 | 94, 95, 96, 97, | |
| | | | | | | | 98, 99, 100 | |
| | | | | | | | | APG00254.0 |
| | | | | | | | | US_2016_0355842_A1-40 |
| | | | | | | | | (50.46% identity, 56.53% |
| | | | | | | | | similarity) |
| | | | | | | | | EEM86552.1 (47.49% |
| | | | | | | | | identity, 65.49% similarity) |
| | | | | | | | | US_8461421_B2-117 (47.08% |
| | | | | | | | | identity, 64.91% similarity) |
| | | | | | | | | WP_095022094.1 (46.61% |
| | | | | | | | | identity, 63.72% similarity) |
| | | | | | | | | APG00552.0 |
| | | | | | | | | US_2016_0366881_A1-110 |
| | | | | | | | | (46.59% identity, 64.99% |
| | | | | | | | | similarity) |
| | | | | | | | | WP_061885189.1 (46.47% |
| | | | | | | | | identity, 64.41% similarity) |
| | | | | | | | | WP_088118891.1 (46.18% |
| | | | | | | | | identity, 64.12% similarity) |
| | | | | | | | | WP_036654376.1 (44.9% |
| | | | | | | | | identity, 59.77% similarity) |
| | | | | | | | | APG08369.0 (44.54% |
| | | | | | | | | identity, 63.72% similarity) |
| APG03553.0 | 337 | 338 | | | MTX | 60, 65, 70, 75, 80, 85, 90, 91, | 65, 70, 75, 80, 85, | APG09091.0 (98.29% identity, |
| | | | | | | 92, 93, 94, 95, 96, 97, 98, | 90, 91, 92, 93, | 98.5% similarity) |
| | | | | | | 99, 100 | 94, 95, 96, 97, | |
| | | | | | | | 98, 99, 100 | |
| | | | | | | | | APG01197.0 (95.12% |
| | | | | | | | | identity, 95.12% similarity) |
| | | | | | | | | WP_078187232.1 (76.28% |
| | | | | | | | | identity, 77.99% similarity) |
| | | | | | | | | APG03848.0 (59.71% |
| | | | | | | | | identity, 63.26% similarity) |
| | | | | | | | | WP_075718639.1 (53.86% |
| | | | | | | | | identity, 57.93% similarity) |
| | | | | | | | | WP_075716873.1 (53.66% |
| | | | | | | | | identity, 57.93% similarity) |
| | | | | | | | | APG03638.0 (48.38% |
| | | | | | | | | identity, 53.44% similarity) |
| | | | | | | | | OOR71217.1 (48.38% |
| | | | | | | | | identity, 53.44% similarity) |
| | | | | | | | | APG08605.0 (48.18% |
| | | | | | | | | identity, 53.44% similarity) |
| | | | | | | | | WP_078187960.1 (44.58% |
| | | | | | | | | identity, 50.18% similarity) |
| APG04492.0 | 339 | | | | Cry | 50, 55, 60, 65, 70, 75, 80, 85 | 60, 65, 70, 75, 80, | APG09512.0 (99.55% |
| | | | | | | 90, 91, 92, 93, 94, 95, 96, | 85, 90, 91, 92, | identity, 99.77% similarity) |
| | | | | | | 97, 98, 99, 100 | 93, 94, 95, 96, | |
| | | | | | | | 97, 98, 99, 100 | |
| | | | | | | | | APG06997.0 (48.09% |
| | | | | | | | | identity, 57.55% similarity) |
| | | | | | | | | APG08681.0 (29.34% |
| | | | | | | | | identity, 44.75% similarity) |
| | | | | | | | | WP_048536324.1 (29.34% |
| | | | | | | | | identity, 44.75% similarity) |
| | | | | | | | | APG00626.0 |
| | | | | | | | | US_2016_0366881_A1-124 |
| | | | | | | | | (26.71% identity, 39.43% |
| | | | | | | | | similarity) |
| | | | | | | | | WP_050845493.1 (25.48% |
| | | | | | | | | identity, 39.86% similarity) |
| APG04702.0 | 340 | 341 | | | MTX | 92, 93, 94, 95, 96, 97, 98, 99, | 97, 98, 99, 100 | APG05468.0 (96.03% |
| | | | | | | 100 | | identity, 98.01% similarity) |
| | | | | | | | | APG00825.0 |
| | | | | | | | | US_2016_0355842_A1-174 |
| | | | | | | | | (91.75% identity, 96.37% |
| | | | | | | | | similarity) |
| | | | | | | | | APG00272.0 |
| | | | | | | | | US_2016_0304898_A1-210 |
| | | | | | | | | (78.48% identity, 89.4% |
| | | | | | | | | similarity) |
| | | | | | | | | APG00019.0 |
| | | | | | | | | US_2016_0304898_A1-31 |
| | | | | | | | | (64.29% identity, 75.0% |
| | | | | | | | | similarity) |
| | | | | | | | | WP_080674340.1 (44.7% |
| | | | | | | | | identity, 58.94% similarity) |
| | | | | | | | | WP_051388441.1 (40.91% |
| | | | | | | | | identity, 61.36% similarity) |
| | | | | | | | | WP_048593204.1 (40.59% |
| | | | | | | | | identity, 59.74% similarity) |
| | | | | | | | | APG00851.0 |
| | | | | | | | | US_2016_0311864_A1-222 |
| | | | | | | | | (35.33% identity, 52.4% |
| | | | | | | | | similarity) |
| | | | | | | | | WP_061663532.1 (35.33% |
| | | | | | | | | identity, 52.4% similarity) |
| | | | | | | | | WP_086423658.1 (35.33% |
| | | | | | | | | identity, 52.4% similarity) |
| APG04990.0 | 342 | | | | MTX | 40, 45, 50, 55, 60, 65, 70, 75, | 60, 65, 70, 75, 80, | APG04812.0 (92.51% |
| | | | | | | 80, 85, 90, 91, 92, 93, 94, | 85, 90, 91, 92, | identity, 95.39% similarity) |
| | | | | | | 95, 96, 97, 98, 99, 100 | 93, 94, 95, 96, | |
| | | | | | | | 97, 98, 99, 100 | |
| | | | | | | | | APG00686.0 |
| | | | | | | | | US_2016_0355842_A1-159 |
| | | | | | | | | (36.72% identity, 55.08% |
| | | | | | | | | similarity) |
| | | | | | | | | APG01488.0 (36.44% |
| | | | | | | | | identity, 53.95% similarity) |
| | | | | | | | | APG04345.0 (35.56% |
| | | | | | | | | identity, 53.89% similarity) |
| | | | | | | | | APG00860.0 |
| | | | | | | | | US_2016_0355842_A1-180 |
| | | | | | | | | (29.91% identity, 47.01% |
| | | | | | | | | similarity) |
| | | | | | | | | APG04750.0 (29.08% |
| | | | | | | | | identity, 45.65% similarity) |
| | | | | | | | | APG00586.0 |
| | | | | | | | | US_2016_0355842_A1-135 |
| | | | | | | | | (28.42% identity, 44.77% |
| | | | | | | | | similarity) |
| | | | | | | | | APG00420.0 |
| | | | | | | | | US_2016_0355842_A1-85 |
| | | | | | | | | (28.42% identity, 44.5% |
| | | | | | | | | similarity) |
| | | | | | | | | APG03324.0 (27.96% |
| | | | | | | | | identity, 44.09% similarity) |
| | | | | | | | | APG00323.0 |
| | | | | | | | | US_2016_0355842_A1-60 |
| | | | | | | | | (27.96% identity, 43.82% |
| | | | | | | | | similarity) |
| APG05105.0 | 343 | 346, 344, | | | Cry | 98, 99, 100 | 99, 100 | APG00705.0 |
| | | 345, 347 | | | | | | US_2017_0175134_A1-120 |
| | | | | | | | | (97.3% identity, 98.53% |
| | | | | | | | | similarity) |
| | | | | | | | | ETT82181.1 (92.65% identity, |
| | | | | | | | | 95.83% similarity) |
| | | | | | | | | US_9567381_B2-455 (92.4% |
| | | | | | | | | identity, 95.96% similarity) |
| | | | | | | | | APG01446.0 (92.28% |
| | | | | | | | | identity, 95.3% similarity) |
| | | | | | | | | WP_016093954.1 (92.16% |
| | | | | | | | | identity, 95.34% similarity) |
| | | | | | | | | WP_033729515.1 (92.16% |
| | | | | | | | | identity, 95.34% similarity) |
| | | | | | | | | WP_002147758.1 (91.91% |
| | | | | | | | | identity, 95.47% similarity) |
| | | | | | | | | AGU12794.1 (91.79% |
| | | | | | | | | identity, 95.1% similarity) |
| | | | | | | | | WP_016095385.1 (91.01% |
| | | | | | | | | identity, 94.65% similarity) |
| | | | | | | | | APG00526.0 |
| | | | | | | | | US_2016_0304898_A1-214 |
| | | | | | | | | (87.15% identity, 92.66% |
| | | | | | | | | similarity) |
| APG05140.0 | 348 | 349 | | | MTX | 50, 55, 60, 65, 70, 75, 80, 85, | 65, 70, 75, 80, 85, | APG01367.0 (97.89% |
| | | | | | | 90, 91, 92, 93, 94, 95, 96, | 90, 91, 92, 93, | identity, 99.7% similarity) |
| | | | | | | 97, 98, 99, 100 | 94, 95, 96, 97, | |
| | | | | | | | 98, 99, 100 | |
| | | | | | | | | APG02970.0 (87.65% |
| | | | | | | | | identity, 91.57% similarity) |
| | | | | | | | | APG02808.0 (87.09% |
| | | | | | | | | identity, 91.59% similarity) |
| | | | | | | | | APG05040.0 (83.13% |
| | | | | | | | | identity, 90.36% similarity) |
| | | | | | | | | APG00793.0 |
| | | | | | | | | US_2016_0355842_A1-170 |
| | | | | | | | | (47.28% identity, 64.47% |
| | | | | | | | | similarity) |
| | | | | | | | | APG09460.0 (41.52% |
| | | | | | | | | identity, 59.65% similarity) |
| | | | | | | | | APG00416.0 |
| | | | | | | | | US_2016_0355842_A1-82 |
| | | | | | | | | (41.4% identity, 59.77% |
| | | | | | | | | similarity) |
| | | | | | | | | US_8829279_B2-11 (40.44% |
| | | | | | | | | identity, 57.1% similarity) |
| | | | | | | | | APG05956.0 (40.35% |
| | | | | | | | | identity, 58.77% similarity) |
| | | | | | | | | WP_072335847.1 (40.17% |
| | | | | | | | | identity, 56.46% similarity) |
| APG05183.0 | 350 | 351 | | | MTX | 90, 91, 92, 93, 94, 95, 96, 97, | 92, 93, 94, 95, 96, | WP_016099228.1 (97.33% |
| | | | | | | 98, 99, 100 | 97, 98, 99, 100 | identity, 98.67% similarity) |
| | | | | | | | | APG02007.0 (93.36% |
| | | | | | | | | identity, 95.68% similarity) |
| | | | | | | | | APG03898.0 (88.47% |
| | | | | | | | | identity, 91.59% similarity) |
| | | | | | | | | APG00765.0 (87.5% identity, |
| | | | | | | | | 89.02% similarity) |
| | | | | | | | | WP_088114034.1 (87.0% |
| | | | | | | | | identity, 91.0% similarity) |
| | | | | | | | | APG09869.0 (86.54% |
| | | | | | | | | identity, 88.99% similarity) |
| | | | | | | | | APG06727.0 (84.21% |
| | | | | | | | | identity, 85.67% similarity) |
| | | | | | | | | APG00693.0 |
| | | | | | | | | US_2017_0175134_A1-106 |
| | | | | | | | | (80.62% identity, 85.85% |
| | | | | | | | | similarity) |
| | | | | | | | | US_8461415_B2-31 (80.56% |
| | | | | | | | | identity, 84.26% similarity) |
| | | | | | | | | WP_086390045.1 (78.64% |
| | | | | | | | | identity, 87.38% similarity) |
| APG05475.0 | 352 | | | | Bin | 85, 90, 91, 92, 93, 94, 95, 96, | 90, 91, 92, 93, 94, | APG04536.0 (95.82% |
| | | | | | | 97, 98, 99, 100 | 95, 96, 97, 98, | identity, 98.61% similarity) |
| | | | | | | | 99, 100 | |
| | | | | | | | | WP_016093722.1 (95.82% |
| | | | | | | | | identity, 98.61% similarity) |
| | | | | | | | | APG06051.0 (82.73% |
| | | | | | | | | identity, 85.52% similarity) |
| | | | | | | | | APG01809.0 (77.16% |
| | | | | | | | | identity, 79.67% similarity) |
| | | | | | | | | APG00215.0 |
| | | | | | | | | US_2016_0311864_A1-78 |
| | | | | | | | | (71.31% identity, 81.34% |
| | | | | | | | | similarity) |
| | | | | | | | | WP_087949793.1 (70.17% |
| | | | | | | | | identity, 81.49% similarity) |
| | | | | | | | | APG00880.0 |
| | | | | | | | | US_2016_0366881_A1-134 |
| | | | | | | | | (67.31% identity, 78.67% |
| | | | | | | | | similarity) |
| | | | | | | | | APG00386.0 |
| | | | | | | | | US_2016_0311864_A1-158 |
| | | | | | | | | (61.77% identity, 75.35% |
| | | | | | | | | similarity) |
| | | | | | | | | WP_002167240.1 (60.11% |
| | | | | | | | | identity, 73.85% similarity) |
| | | | | | | | | APG00837.0 (55.37% |
| | | | | | | | | identity, 71.07% similarity) |
| APG05689.0 | 353 | 354, 355 | | | Cry | 65, 70, 75, 80, 85, 90, 91, 92, | 80, 85, 90, 91, 92, | APG05439.0 (92.67% |
| | | | | | | 93, 94, 95, 96, 97, 98, 99, | 93, 94, 95, 96, | identity, 95.11% similarity) |
| | | | | | | 100 | 97, 98, 99, 100 | |
| | | | | | | | | APG09630.0 (64.86% |
| | | | | | | | | identity, 75.23% similarity) |
| | | | | | | | | APG00723.0 |
| | | | | | | | | US_2016_0311864_A1-209 |
| | | | | | | | | (63.41% identity, 73.18% |
| | | | | | | | | similarity) |
| | | | | | | | | APG00787.0 |
| | | | | | | | | US_2017_0175134_A1-156 |
| | | | | | | | | (47.98% identity, 62.52% |
| | | | | | | | | similarity) |
| | | | | | | | | WP_082770008.1 (44.2% |
| | | | | | | | | identity, 57.14% similarity) |
| | | | | | | | | KXH80331.1 (43.76% identity, |
| | | | | | | | | 56.69% similarity) |
| | | | | | | | | APG00471.0 |
| | | | | | | | | US_2016_0366881_A1-85 |
| | | | | | | | | (38.08% identity, 51.87% |
| | | | | | | | | similarity) |
| | | | | | | | | APG01679.0 (35.23% |
| | | | | | | | | identity, 48.5% similarity) |
| | | | | | | | | WP_048536362.1 (35.23% |
| | | | | | | | | identity, 48.5% similarity) |
| | | | | | | | | APG09441.0 (34.28% |
| | | | | | | | | identity, 47.08% similarity) |
| APG07291.0 | 356 | 357 | | | Cry | 93, 94, 95, 96, 97, 98, 99, 100 | 97, 98, 99, 100 | WP_017762619.1 (92.19% |
| | | | | | | | | identity, 95.93% similarity) |
| | | | | | | | | APG01399.0 (92.02% |
| | | | | | | | | identity, 96.1% similarity) |
| | | | | | | | | APG06587.0 (88.24% |
| | | | | | | | | identity, 92.94% similarity) |
| | | | | | | | | CA_2844913-205 (57.12% |
| | | | | | | | | identity, 69.35% similarity) |
| | | | | | | | | CA_2844913-206 (56.95% |
| | | | | | | | | identity, 69.18% similarity) |
| | | | | | | | | APG00460.0 |
| | | | | | | | | US_2016_0366881_A1-75 |
| | | | | | | | | (52.1% identity, 66.99% |
| | | | | | | | | similarity) |
| | | | | | | | | WP_078205743.1 (51.94% |
| | | | | | | | | identity, 66.83% similarity) |
| | | | | | | | | APG00626.0 |
| | | | | | | | | US_2016_0366881_A1-124 |
| | | | | | | | | (36.59% identity, 51.83% |
| | | | | | | | | similarity) |
| | | | | | | | | WP_017762581.1 (35.65% |
| | | | | | | | | identity, 50.16% similarity) |
| | | | | | | | | APG06997.0 (34.76% |
| | | | | | | | | identity, 51.03% similarity) |
| APG07381.0 | 358 | 359 | | | MTX | 85, 90, 91, 92, 93, 94, 95, 96, | 90, 91, 92, 93, 94, | WP_068985586.1 (95.87% |
| | | | | | | 97, 98, 99, 100 | 95, 96, 97, 98, | identity, 97.64% similarity) |
| | | | | | | | 99, 100 | |
| | | | | | | | | APG09392.0 (95.58% identity, |
| | | | | | | | | 97.05% similarity) |
| | | | | | | | | APG01874.0 (92.07% |
| | | | | | | | | identity, 93.77% similarity) |
| | | | | | | | | APG00417.0 |
| | | | | | | | | US_2016_0355842_A1-83 |
| | | | | | | | | (82.16% identity, 88.6% |
| | | | | | | | | similarity) |
| | | | | | | | | WP_071745741.1 (81.29% |
| | | | | | | | | identity, 87.72% similarity) |
| | | | | | | | | WP_090695735.1 (80.99% |
| | | | | | | | | identity, 87.13% similarity) |
| | | | | | | | | APG00667.0 |
| | | | | | | | | US_2016_0355842_A1-155 |
| | | | | | | | | (59.82% identity, 70.97% |
| | | | | | | | | similarity) |
| | | | | | | | | APG00938.0 |
| | | | | | | | | US_2016_0355842_A1-190 |
| | | | | | | | | (54.93% identity, 68.17% |
| | | | | | | | | similarity) |
| | | | | | | | | APG00794.0 |
| | | | | | | | | US_2016_0355842_A1-171 |
| | | | | | | | | (54.37% identity, 65.35% |
| | | | | | | | | similarity) |
| | | | | | | | | APG09492.0 (53.93% |
| | | | | | | | | identity, 67.13% similarity) |
| | | | | | | | | APG09055.0 (53.93% |
| | | | | | | | | identity, 66.85% similarity) |
| APG07452.0 | 360 | 361, 362 | | | MTX | 96, 97, 98, 99, 100 | 98, 99, 100 | APG00994.0 |
| | | | | | | | | US_2016_0355842_A1-198 |
| | | | | | | | | (95.88% identity, 97.53% |
| | | | | | | | | similarity) |
| | | | | | | | | APG09469.0 (94.23% |
| | | | | | | | | identity, 96.98% similarity) |
| | | | | | | | | AQM56946.1 (93.96% |
| | | | | | | | | identity, 95.6% similarity) |
| | | | | | | | | APG05791.0 (58.24% |
| | | | | | | | | identity, 73.9% similarity) |
| | | | | | | | | APG00429.0 |
| | | | | | | | | US_2016_0366881_A1-53 |
| | | | | | | | | (57.42% identity, 73.35% |
| | | | | | | | | similarity) |
| | | | | | | | | APG03889.0 (57.22% |
| | | | | | | | | identity, 71.93% similarity) |
| | | | | | | | | APG03067.0 (56.95% |
| | | | | | | | | identity, 71.12% similarity) |
| | | | | | | | | APG02557.0 (56.68% |
| | | | | | | | | identity, 71.12% similarity) |
| | | | | | | | | WP_091735042.1 (26.7% |
| | | | | | | | | identity, 38.54% similarity) |
| APG07891.0 | 363 | 364 | | | Bin | 98, 99, 100 | 99, 100 | APG00284.0 |
| | | | | | | | | US_2016_0311864_A1-117 |
| | | | | | | | | (97.05% identity, 98.12% |
| | | | | | | | | similarity) |
| | | | | | | | | APG00731.0 |
| | | | | | | | | US_2016_0311864_A1-211 |
| | | | | | | | | (91.42% identity, 96.51% |
| | | | | | | | | similarity) |
| | | | | | | | | APG04832.0 (90.88% |
| | | | | | | | | identity, 95.71% similarity) |
| | | | | | | | | APG02742.0 (90.35% |
| | | | | | | | | identity, 95.17% similarity) |
| | | | | | | | | WP_000143307.1 (90.08% |
| | | | | | | | | identity, 95.44% similarity) |
| | | | | | | | | WP_089172220.1 (90.08% |
| | | | | | | | | identity, 95.44% similarity) |
| | | | | | | | | WP_000143308.1 (89.28% |
| | | | | | | | | identity, 94.64% similarity) |
| | | | | | | | | APG00035.0 |
| | | | | | | | | US_2016_0304898_A1-58 |
| | | | | | | | | (89.01% identity, 95.71% |
| | | | | | | | | similarity) |
| | | | | | | | | APG00669.0 |
| | | | | | | | | US_2016_0355842_A1-156 |
| | | | | | | | | (87.67% identity, 93.03% |
| | | | | | | | | similarity) |
| | | | | | | | | APG00377.0 |
| | | | | | | | | US_2016_0311864_A1-154 |
| | | | | | | | | (86.6% identity, 92.76% |
| | | | | | | | | similarity) |
| APG08547.0 | 365 | 366 | | | MTX | 45, 50, 55, 60, 65, 70, 75, 80, | 60, 65, 70, 75, 80, | APG05787.0 (90.71% |
| | | | | | | 85, 90, 91, 92, 93, 94, 95, | 85, 90, 91, 92, | identity, 95.05% similarity) |
| | | | | | | 96, 97, 98, 99, 100 | 93, 94, 95, 96, | |
| | | | | | | | 97, 98, 99, 100 | |
| | | | | | | | | APG00371.0 |
| | | | | | | | | US_2016_0355842_A1-72 |
| | | | | | | | | (40.97% identity, 58.17% |
| | | | | | | | | similarity) |
| | | | | | | | | WP_075718639.1 (38.24% |
| | | | | | | | | identity, 53.54% similarity) |
| | | | | | | | | WP_075716873.1 (37.96% |
| | | | | | | | | identity, 53.26% similarity) |
| | | | | | | | | APG03848.0 (37.25% |
| | | | | | | | | identity, 50.7% similarity) |
| | | | | | | | | APG03638.0 (36.9% identity, |
| | | | | | | | | 52.68% similarity) |
| | | | | | | | | OOR71217.1 (36.9% identity, |
| | | | | | | | | 52.68% similarity) |
| | | | | | | | | APG08605.0 (36.62% |
| | | | | | | | | identity, 52.68% similarity) |
| | | | | | | | | WP_065486138.1 (32.29% |
| | | | | | | | | identity, 48.29% similarity) |
| | | | | | | | | WP_065487080.1 (32.29% |
| | | | | | | | | identity, 48.29% similarity) |
| APG09091.0 | 367 | 368 | | | MTX | 60, 65, 70, 75, 80, 85, 90, 91, | 65, 70, 75, 80, 85, | APG03553.0 (98.29% identity, |
| | | | | | | 92, 93, 94, 95, 96, 97, 98, | 90, 91, 92, 93, | 98.5% similarity) |
| | | | | | | 99, 100 | 94, 95, 96, 97, | |
| | | | | | | | 98, 99, 100 | |
| | | | | | | | | APG01197.0 (93.5% identity, |
| | | | | | | | | 93.7% similarity) |
| | | | | | | | | WP_078187232.1 (76.5% |
| | | | | | | | | identity, 78.42% similarity) |
| | | | | | | | | APG03848.0 (58.45% |
| | | | | | | | | identity, 61.3% similarity) |
| | | | | | | | | WP_075718639.1 (54.27% |
| | | | | | | | | identity, 58.33% similarity) |
| | | | | | | | | WP_075716873.1 (54.07% |
| | | | | | | | | identity, 58.13% similarity) |
| | | | | | | | | APG03638.0 (48.58% |
| | | | | | | | | identity, 53.64% similarity) |
| | | | | | | | | OOR71217.1 (48.58% |
| | | | | | | | | identity, 53.64% similarity) |
| | | | | | | | | APG08605.0 (48.38% |
| | | | | | | | | identity, 53.64% similarity) |
| | | | | | | | | WP_078187960.1 (44.77% |
| | | | | | | | | identity, 50.36% similarity) |
| APG09392.0 | 369 | 370 | | | MTX | 85, 90, 91, 92, 93, 94, 95, 96, | 91, 92, 93, 94, 95, | WP_068985586.1 (97.05% |
| | | | | | | 97, 98, 99, 100 | 96, 97, 98, 99, | identity, 98.82% similarity) |
| | | | | | | | 100 | |
| | | | | | | | | APG07381.0 (95.58% identity, |
| | | | | | | | | 97.05% similarity) |
| | | | | | | | | APG01874.0 (93.2% identity, |
| | | | | | | | | 94.9% similarity) |
| | | | | | | | | APG00417.0 |
| | | | | | | | | US_2016_0355842_A1-83 |
| | | | | | | | | (83.63% identity, 90.35% |
| | | | | | | | | similarity) |
| | | | | | | | | WP_071745741.1 (82.46% |
| | | | | | | | | identity, 89.47% similarity) |
| | | | | | | | | WP_090695735.1 (81.58% |
| | | | | | | | | identity, 88.3% similarity) |
| | | | | | | | | APG00667.0 |
| | | | | | | | | US_2016_0355842_A1-155 |
| | | | | | | | | (59.82% identity, 70.97% |
| | | | | | | | | similarity) |
| | | | | | | | | APG00938.0 |
| | | | | | | | | US_2016_0355842_A1-190 |
| | | | | | | | | (55.37% identity, 68.08% |
| | | | | | | | | similarity) |
| | | | | | | | | APG00794.0 |
| | | | | | | | | US_2016_0355842_A1-171 |
| | | | | | | | | (54.24% identity, 64.97% |
| | | | | | | | | similarity) |
| | | | | | | | | APG00569.0 |
| | | | | | | | | US_2016_0355842_A1-129 |
| | | | | | | | | (54.17% identity, 66.11% |
| | | | | | | | | similarity) |
| APG09536.0 | 371 | 372 | | | Cry | 65, 70, 75, 80, 85, 90, 91, 92, | 80, 85, 90, 91, 92, | APG01135.0 (93.58% |
| | | | | | | 93, 94, 95, 96, 97, 98, 99, | 93, 94, 95, 96, | identity, 94.48% similarity) |
| | | | | | | 100 | 97, 98, 99, 100 | |
| | | | | | | | | WP_081631318.1 (92.09% |
| | | | | | | | | identity, 94.18% similarity) |
| | | | | | | | | CCW05160.1 (91.34% |
| | | | | | | | | identity, 93.43% similarity) |
| | | | | | | | | APG00042.0 |
| | | | | | | | | US_2016_0304898_A1-67 |
| | | | | | | | | (64.3% identity, 78.37% |
| | | | | | | | | similarity) |
| | | | | | | | | APG07751.0 (31.46% |
| | | | | | | | | identity, 47.33% similarity) |
| | | | | | | | | APG00122.0 |
| | | | | | | | | US_2016_0304898_A1-143 |
| | | | | | | | | (31.36% identity, 48.69% |
| | | | | | | | | similarity) |
| | | | | | | | | WP_006922195.1 (31.32% |
| | | | | | | | | identity, 46.98% similarity) |
| | | | | | | | | APG04689.0 (31.06% |
| | | | | | | | | identity, 47.14% similarity) |
| | | | | | | | | WP_006919322.1 (31.06% |
| | | | | | | | | identity, 47.14% similarity) |
| | | | | | | | | APG00086.0 |
| | | | | | | | | US_2016_0304898_A1-113 |
| | | | | | | | | (29.72% identity, 45.05% |
| | | | | | | | | similarity) |
| APG00885.0 | 373 | | | | PI-PLC | 85, 90, 91, 92, 93, 94, 95, 96, | 90, 91, 92, 93, 94, | WP_098568040.1 (97.39% |
| | | | | | | 97, 98, 99, 100 | 95, 96, 97, 98, | identity, 98.57% similarity) |
| | | | | | | | 99, 100 | |
| | | | | | | | | APG04008.0 (96.91% |
| | | | | | | | | identity, 98.1% similarity) |
| | | | | | | | | APG02635.0 (91.25% |
| | | | | | | | | identity, 93.85% similarity) |
| | | | | | | | | WP_098876538.1 (83.22% |
| | | | | | | | | identity, 87.13% similarity) |
| | | | | | | | | APG00447.0 |
| | | | | | | | | US_2016_0366881_A1-69 |
| | | | | | | | | (81.22% identity, 85.92% |
| | | | | | | | | similarity) |
| | | | | | | | | APG00338.0 |
| | | | | | | | | US_2016_0366881_A1-21 |
| | | | | | | | | (57.17% identity, 61.55% |
| | | | | | | | | similarity) |
| | | | | | | | | WP_050592191.1 (43.45% |
| | | | | | | | | identity, 47.92% similarity) |
| | | | | | | | | WP_078214342.1 (42.15% |
| | | | | | | | | identity, 47.13% similarity) |
| | | | | | | | | APG06043.0 (37.17% |
| | | | | | | | | identity, 52.53% similarity) |
| | | | | | | | | WP_080120355.1 (36.51% |
| | | | | | | | | identity, 47.8% similarity) |
| APG01466.0 | 374 | 375 | | | Cry34 | 5, 10, 15, 20, 25, 30, 35, 40, | 5, 10, 15, 20, 25, | APG06936.0 (97.07% |
| | | | | | | 45, 50, 55, 60, 65, 70, 75, 80, | 30, 35, 40, 45, | identity, 97.72% similarity) |
| | | | | | | 85, 90, 91, 92, 93, 94, 95, | 50, 55, 60, 65, 70, | |
| | | | | | | 96, 97, 98, 99, 100 | 75, 80, 85, 90, | |
| | | | | | | | 91, 92, 93, 94, | |
| | | | | | | | 95, 96, 97, 98, 99, | |
| | | | | | | | 100 | |
| | | | | | | | | WP_098559511.1 (95.77% |
| | | | | | | | | identity, 96.74% similarity) |
| | | | | | | | | WP_098683452.1 (95.44% |
| | | | | | | | | identity, 96.42% similarity) |
| | | | | | | | | WP_045520498.1 (30.82% |
| | | | | | | | | identity, 35.53% similarity) |
| | | | | | | | | PFJ10581.1 (29.32% identity, |
| | | | | | | | | 29.64% similarity) |
| | | | | | | | | PGM63518.1 (25.19% |
| | | | | | | | | identity, 37.02% similarity) |
| APG01762.0 | 376 | 377 | | | Bin | 92, 93, 94, 95, 96, 97, 98, 99, | 98, 99, 100 | APG04832.0 (94.64% |
| | | | | | | 100 | | identity, 97.05% similarity) |
| | | | | | | | | WP_000143308.1 (94.1% |
| | | | | | | | | identity, 96.51% similarity) |
| | | | | | | | | WP_097987939.1 (93.57% |
| | | | | | | | | identity, 95.98% similarity) |
| | | | | | | | | APG00731.0 |
| | | | | | | | | US_2016_0311864_A1-211 |
| | | | | | | | | (91.42% identity, 97.59% |
| | | | | | | | | similarity) |
| | | | | | | | | WP_000143307.1 (91.42% |
| | | | | | | | | identity, 95.71% similarity) |
| | | | | | | | | WP_089172220.1 (91.15% |
| | | | | | | | | identity, 95.98% similarity) |
| | | | | | | | | APG07891.0 (90.35% |
| | | | | | | | | identity, 96.78% similarity) |
| | | | | | | | | APG02742.0 (89.54% |
| | | | | | | | | identity, 96.25% similarity) |
| | | | | | | | | APG00284.0 |
| | | | | | | | | US_2016_0311864_A1-117 |
| | | | | | | | | (89.54% identity, 95.44% |
| | | | | | | | | similarity) |
| | | | | | | | | APG00035.0 |
| | | | | | | | | US_2016_0304898_A1-58 |
| | | | | | | | | (89.01% identity, 96.51% |
| | | | | | | | | similarity) |
| APG01823.0 | 378 | 379 | | | MTX | 90, 91, 92, 93, 94, 95, 96, 97, | 93, 94, 95, 96, 97, | APG07944.0 (91.64% |
| | | | | | | 98, 99, 100 | 98, 99, 100 | identity, 95.26% similarity) |
| | | | | | | | | APG00246.0 |
| | | | | | | | | US_2016_0355842_A1-35 |
| | | | | | | | | (89.69% identity, 92.76% |
| | | | | | | | | similarity) |
| | | | | | | | | WP_098873587.1 (89.69% |
| | | | | | | | | identity, 92.76% similarity) |
| | | | | | | | | US_8461415_B2-38 (54.86% |
| | | | | | | | | identity, 69.46% similarity) |
| | | | | | | | | US_8461415_B2-36 (50.54% |
| | | | | | | | | identity, 67.03% similarity) |
| | | | | | | | | APG00483.0 |
| | | | | | | | | US_2016_0355842_A1-104 |
| | | | | | | | | (44.74% identity, 60.79% |
| | | | | | | | | similarity) |
| | | | | | | | | APG00414.0 |
| | | | | | | | | US_2016_0355842_A1-81 |
| | | | | | | | | (43.75% identity, 57.03% |
| | | | | | | | | similarity) |
| | | | | | | | | APG00593.0 |
| | | | | | | | | US_2016_0355842_A1-136 |
| | | | | | | | | (43.7% identity, 56.81% |
| | | | | | | | | similarity) |
| | | | | | | | | APG00995.0 |
| | | | | | | | | US_2016_0355842_A1-200 |
| | | | | | | | | (43.7% identity, 56.81% |
| | | | | | | | | similarity) |
| | | | | | | | | WP_097899326.1 (43.7% |
| | | | | | | | | identity, 56.81% similarity) |
| APG02655.0 | 380 | 381 | | | MTX | 55, 60, 65, 70, 75, 80, 85, 90, | 70, 75, 80, 85, 90, | APG02801.0 (98.18% |
| | | | | | | 91, 92, 93, 94, 95, 96, 97, | 91, 92, 93, 94, | identity, 98.48% similarity) |
| | | | | | | 98, 99, 100 | 95, 96, 97, 98, | |
| | | | | | | | 99, 100 | |
| | | | | | | | | KGA84359.1 (98.18% identity, |
| | | | | | | | | 98.48% similarity) |
| | | | | | | | | WP_036224766.1 (97.58% |
| | | | | | | | | identity, 98.18% similarity) |
| | | | | | | | | WP_081937018.1 (95.15% |
| | | | | | | | | identity, 95.45% similarity) |
| | | | | | | | | WP_094075110.1 (78.31% |
| | | | | | | | | identity, 89.16% similarity) |
| | | | | | | | | WP_079562232.1 (78.08% |
| | | | | | | | | identity, 88.89% similarity) |
| | | | | | | | | APG08369.0 (50.45% |
| | | | | | | | | identity, 65.67% similarity) |
| | | | | | | | | APG00552.0 |
| | | | | | | | | US_2016_0366881_A1-110 |
| | | | | | | | | (49.86% identity, 64.06% |
| | | | | | | | | similarity) |
| | | | | | | | | WP_061885189.1 (48.8% |
| | | | | | | | | identity, 64.07% similarity) |
| | | | | | | | | WP_088118891.1 (48.8% |
| | | | | | | | | identity, 64.07% similarity) |
| APG02862.0 | 382 | 383 | | | MTX | 85, 90, 91, 92, 93, 94, 95, 96, | 90, 91, 92, 93, 94, | APG09392.0 (98.23% |
| | | | | | | 97, 98, 99, 100 | 95, 96, 97, 98, | identity, 98.82% similarity) |
| | | | | | | | 99, 100 | |
| | | | | | | | | APG07381.0 (96.17% |
| | | | | | | | | identity, 97.64% similarity) |
| | | | | | | | | WP_068985586.1 (96.17% |
| | | | | | | | | identity, 97.64% similarity) |
| | | | | | | | | APG01874.0 (92.35% |
| | | | | | | | | identity, 93.77% similarity) |
| | | | | | | | | APG00417.0 |
| | | | | | | | | US_2016_0355842_A1-83 |
| | | | | | | | | (83.33% identity, 89.77% |
| | | | | | | | | similarity) |
| | | | | | | | | WP_071745741.1 (81.87% |
| | | | | | | | | identity, 88.89% similarity) |
| | | | | | | | | WP_090695735.1 (81.58% |
| | | | | | | | | identity, 87.72% similarity) |
| | | | | | | | | APG00667.0 |
| | | | | | | | | US_2016_0355842_A1-155 |
| | | | | | | | | (59.82% identity, 70.67% |
| | | | | | | | | similarity) |
| | | | | | | | | WP_098018654.1 (59.82% |
| | | | | | | | | identity, 70.67% similarity) |
| | | | | | | | | APG00938.0 |
| | | | | | | | | US_2016_0355842_A1-190 |
| | | | | | | | | (55.21% identity, 67.61% |
| | | | | | | | | similarity) |
| APG02990.0 | 384 | 385 | | | MTX | 45, 50, 55, 60, 65, 70, 75, 80, | 60, 65, 70, 75, 80, | APG08547.0 (91.69% |
| | | | | | | 85, 90, 91, 92, 93, 94, 95, | 85, 90, 91, 92, | identity, 94.15% similarity) |
| | | | | | | 96, 97, 98, 99, 100 | 93, 94, 95, 96, | |
| | | | | | | | 97, 98, 99, 100 | |
| | | | | | | | | APG05787.0 (90.15% |
| | | | | | | | | identity, 93.54% similarity) |
| | | | | | | | | APG00371.0 |
| | | | | | | | | US_2016_0355842_A1-72 |
| | | | | | | | | (41.26% identity, 57.59% |
| | | | | | | | | similarity) |
| | | | | | | | | WP_075718639.1 (38.5% |
| | | | | | | | | identity, 53.19% similarity) |
| | | | | | | | | WP_075716873.1 (38.23% |
| | | | | | | | | identity, 52.91% similarity) |
| | | | | | | | | APG03848.0 (37.08% |
| | | | | | | | | identity, 50.84% similarity) |
| | | | | | | | | APG03638.0 (37.01% |
| | | | | | | | | identity, 53.11% similarity) |
| | | | | | | | | OOR71217.1 (37.01% |
| | | | | | | | | identity, 53.11% similarity) |
| | | | | | | | | APG08605.0 (36.72% |
| | | | | | | | | identity, 53.11% similarity) |
| | | | | | | | | WP_100064511.1 (35.65% |
| | | | | | | | | identity, 52.37% similarity) |
| APG04672.0 | 386 | 387 | | | Vip4 | 80, 85, 90, 91, 92, 93, 94, 95, | 85, 90, 91, 92, 93, | WP_016123960.1 (91.33% |
| | | | | | | 96, 97, 98, 99, 100 | 94, 95, 96, 97, | identity, 95.77% similarity) |
| | | | | | | | 98, 99, 100 | |
| | | | | | | | | APG02031.0 (90.91% |
| | | | | | | | | identity, 95.88% similarity) |
| | | | | | | | | CA_2844913-129 (79.15% |
| | | | | | | | | identity, 82.68% similarity) |
| | | | | | | | | CA_2844913-130 (79.15% |
| | | | | | | | | identity, 82.68% similarity) |
| | | | | | | | | APG04069.0 (65.23% |
| | | | | | | | | identity, 75.65% similarity) |
| | | | | | | | | EOQ09146.1 (53.38% |
| | | | | | | | | identity, 55.6% similarity) |
| | | | | | | | | APG01474.0 (53.37% |
| | | | | | | | | identity, 67.67% similarity) |
| | | | | | | | | APG02585.0 (52.71% |
| | | | | | | | | identity, 66.93% similarity) |
| | | | | | | | | WP_087876282.1 (51.4% |
| | | | | | | | | identity, 65.9% similarity) |
| | | | | | | | | APG07032.0 (51.17% |
| | | | | | | | | identity, 64.49% similarity) |
| APG05717.0 | 388 | 389 | | | Bin | 90, 91, 92, 93, 94, 95, 96, 97, | 93, 94, 95, 96, 97, | APG09069.0 (90.64% |
| | | | | | | 98, 99, 100 | 98, 99, 100 | identity, 94.65% similarity) |
| | | | | | | | | APG00413.0 |
| | | | | | | | | US_2016_0311864_A1-174 |
| | | | | | | | | (89.33% identity, 92.27% |
| | | | | | | | | similarity) |
| | | | | | | | | APG06920.0 (87.53% |
| | | | | | | | | identity, 91.25% similarity) |
| | | | | | | | | KEZ80012.1 (84.57% identity, |
| | | | | | | | | 90.69% similarity) |
| | | | | | | | | APG00230.0 |
| | | | | | | | | US_2016_0311864_A1-85 |
| | | | | | | | | (80.16% identity, 89.42% |
| | | | | | | | | similarity) |
| | | | | | | | | WP_098772949.1 (80.16% |
| | | | | | | | | identity, 89.15% similarity) |
| | | | | | | | | US_9321814_B2-2 (79.52% |
| | | | | | | | | identity, 87.77% similarity) |
| | | | | | | | | US_9321814_B2-3 (79.26% |
| | | | | | | | | identity, 87.5% similarity) |
| | | | | | | | | WP_098876539.1 (78.99% |
| | | | | | | | | identity, 87.23% similarity) |
| | | | | | | | | US_9321814_B2-4 (77.66% |
| | | | | | | | | identity, 85.9% similarity) |
| APG07877.0 | 390 | 391 | | | Bin | 80, 85, 90, 91, 92, 93, 94, 95, | 90, 91, 92, 93, 94, | APG02955.0 (94.95% |
| | | | | | | 96, 97, 98, 99, 100 | 95, 96, 97, 98, | identity, 96.97% similarity) |
| | | | | | | | 99, 100 | |
| | | | | | | | | APG05411.0 (79.4% identity, |
| | | | | | | | | 85.43% similarity) |
| | | | | | | | | APG00412.0 |
| | | | | | | | | US_2016_0311864_A1-173 |
| | | | | | | | | (79.26% identity, 83.46% |
| | | | | | | | | similarity) |
| | | | | | | | | APG00419.0 |
| | | | | | | | | US_2016_0311864_A1-176 |
| | | | | | | | | (78.7% identity, 84.96% |
| | | | | | | | | similarity) |
| | | | | | | | | WP_098634587.1 (78.7% |
| | | | | | | | | identity, 84.96% similarity) |
| | | | | | | | | APG00844.0 |
| | | | | | | | | US_2016_0311864_A1-221 |
| | | | | | | | | (78.54% identity, 83.59% |
| | | | | | | | | similarity) |
| | | | | | | | | APG00203.0 |
| | | | | | | | | US_2016_0311864_A1-69 |
| | | | | | | | | (78.03% identity, 83.59% |
| | | | | | | | | similarity) |
| | | | | | | | | WP_098475832.1 (78.03% |
| | | | | | | | | identity, 83.59% similarity) |
| | | | | | | | | APG01059.0 (78.03% |
| | | | | | | | | identity, 83.33% similarity) |
| | | | | | | | | APG00353.0 |
| | | | | | | | | US_2016_0311864_A1-144 |
| | | | | | | | | (77.78% identity, 84.09% |
| | | | | | | | | similarity) |
| | | | | | | | | WP_099003921.1 (77.78% |
| | | | | | | | | identity, 84.09% similarity) |
| | | | | | | | | APG00301.0 |
| | | | | | | | | US_2016_0311864_A1-131 |
| | | | | | | | | (77.78% identity, 83.59% |
| | | | | | | | | similarity) |
| APG08067.0 | 392 | 393 | | | Cry | 30, 35, 40, 45, 50, 55, 60, 65, | 45, 50, 55, 60, 65, | WP_087343164.1 (96.81% |
| | | | | | | 70, 75, 80, 85, 90, 91, 92, | 70, 75, 80, 85, | identity, 98.34% similarity) |
| | | | | | | 93, 94, 95, 96, 97, 98, 99, 100 | 90, 91, 92, 93, | |
| | | | | | | | 94, 95, 96, 97, 98, | |
| | | | | | | | 99, 100 | |
| | | | | | | | | WP_016742208.1 (96.12% |
| | | | | | | | | identity, 97.78% similarity) |
| | | | | | | | | WP_015892933.1 (93.34% |
| | | | | | | | | identity, 95.98% similarity) |
| | | | | | | | | APG05519.0 (92.79% |
| | | | | | | | | identity, 95.15% similarity) |
| | | | | | | | | WP_069848556.1 (91.4% |
| | | | | | | | | identity, 94.45% similarity) |
| | | | | | | | | WP_017251277.1 (90.71% |
| | | | | | | | | identity, 94.04% similarity) |
| | | | | | | | | APG00182.0 |
| | | | | | | | | US_2016_0355842_A1-17 |
| | | | | | | | | (28.72% identity, 41.6% |
| | | | | | | | | similarity) |
| | | | | | | | | WP_078401802.1 (28.55% |
| | | | | | | | | identity, 40.99% similarity) |
| | | | | | | | | CUB55361.1 (28.34% identity, |
| | | | | | | | | 41.32% similarity) |
| | | | | | | | | APG05711.0 (27.54% |
| | | | | | | | | identity, 41.3% similarity) |

[0012] i. Classes of Pesticidal Proteins

[0013] The pesticidal proteins provided herein and the nucleotide sequences encoding them are useful in methods for impacting pests. That is, the compositions and methods of the invention find use in agriculture for controlling or killing pests, including pests of many crop plants. The pesticidal proteins provided herein are toxin proteins from bacteria and exhibit activity against certain pests. The pesticidal proteins are from several classes of toxins including Cry, Cyt, BIN, Mtx toxins. See, for example, Table 1 for the specific protein classifications of the various SEQ ID NOS provided herein. In addition, reference is made throughout this disclosure to Pfam database entries. The Pfam database is a database of protein families, each represented by multiple sequence alignments and a profile hidden Markov model. Finn et al. (2014) Nucl. Acid Res. Database Issue 42:D222-D230.

[0014] Bacillus thuringiensis (Bt) is a gram-positive bacterium that produces insecticidal proteins as crystal inclusions during its sporulation phase of growth. The proteinaceous inclusions of Bacillus thuringiensis (Bt) are called crystal proteins or δ-endotoxins (or Cry proteins), which are toxic to members of the class Insecta and other invertebrates. Similarly, Cyt proteins are parasporal inclusion proteins from Bt that exhibits hemolytic (Cytolitic) activity or has obvious sequence similarity to a known Cyt protein. These toxins are highly specific to their target organism, are innocuous to humans, vertebrates, and plants.

[0015] The structure of the Cry toxins reveals five conserved amino acid blocks, concentrated mainly in the center of the domain or at the junction between the domains. The Cry toxin consists of three domains, each with a specific function. Domain I is a seven α-helix bundle in which a central helix is completely surrounded by six outer helices. This domain is implicated in channel formation in the membrane. Domain II appears as a triangular column of three anti-parallel β-sheets, which are similar to antigen-binding regions of immunoglobulins. Domain III contains anti-parallel β-strands in a β sandwich form. The N-terminal part of the toxin protein is responsible for its toxicity and specificity and contains five conserved regions. The C-terminal part is usually highly conserved and probably responsible for crystal formation. See, for example, U.S. Pat. No. 8,878,007.

[0016] Strains of B. thuringiensis show a wide range of specificity against different insect orders (Lepidoptera, Diptera, Coleoptera, Hymenoptera, Homoptera, Phthiraptera or Mallophaga, and Acari) and other invertebrates (Nemathelminthes, Platyhelminthes, and Sarocomastebrates). The cry proteins have been classified into groups based on toxicity to various insect and invertebrate groups. Generally, Cry I demonstrates toxicity to lepidopterans, Cry II to lepidopterans and dipterans, CryIII to coleopterans, Cry IV to dipterans, and Cry V and Cry VI to nematodes. New Cry proteins can be identified and assigned to a Cry group based on amino acid identity. See, for example, Bravo, A. (1997) J. of Bacteriol. 179:2793-2801; Bravo et al. (2013) Microb. Biotechnol. 6:17-26, herein incorporated by reference.

[0017] Over 750 different cry gene sequences have been classified into 73 groups (Cry1-Cry73), with new members of this gene family continuing to be discovered (Crickmore et al. (2014) www.btnomenclature.info/). The cry gene family consists of several phylogentically non-related protein families that may have different modes of action: the family of three-domain Cry toxins, the family of mosquitocidal Cry toxins, the family of the binary-like toxins, and the Cyt family of toxins (Bravo et al., 2005). Some Bt strains produce additional insecticidal toxins, the VIP toxins. See, also, Cohen et al. (2011) J. Mol. Biol. 413:4-814; Crickmore et al. (2014) Bacillus thuringiensis toxin nomenclature, found on the world wide web at lifesci.sussex.ac.uk/home/Neil_Crickmore/Bt/; Crickmore et al. (1988) Microbiol. Mol. Biol. Rev. 62: 807-813; Gill et al. (1992) Ann. Rev. Entomol. 37: 807-636; Goldbert et al. (1997) Appl. Environ. Microbiol. 63:2716-2712; Knowles et al. (1992) Proc. R. Soc. Ser. B. 248: 1-7; Koni et al. (1994) Microbiology 140: 1869-1880; Lailak et al. (2013) Biochem. Biophys. Res. Commun. 435: 216-221; Lopez-Diaz et al. (2013) Environ. Microbiol. 15: 3030-3039; Perez et al. (2007) Cell. Microbiol. 9: 2931-2937; Promdonkoy et al. (2003) Biochem. J. 374: 255-259; Rigden (2009) FEBS Lett. 583: 1555-1560; Schnepf et al. (1998) Microbiol. Mol. Biol. Rev. 62: 775-806; Soberon et al. (2013) Peptides 41: 87-93; Thiery et al. (1998) J. Am. Mosq. Control Assoc. 14: 472-476; Thomas et al. (1983) FEBS Lett. 154: 362-368; Wirth et al. (1997) Proc. Natl. Acad. Sci. U.S.A. 94: 10536-10540; Wirth et al (2005) Appl. Environ. Microbiol. 71: 185-189; and, Zhang et al. (2006) Biosci. Biotechnol. Biochem. 70: 2199-2204; each of which is herein incorporated by reference in their entirety.

[0018] Cyt designates a parasporal crystal inclusion protein from Bacillus thuringiensis with cytolytic activity, or a protein with sequence similarity to a known Cyt protein. (Crickmore et al. (1998) Microbiol. Mol. Biol. Rev. 62: 807-813). The gene is denoted by cyt. These proteins are different in structure and activity from Cry proteins (Gill et al. (1992) Annu. Rev. Entomol. 37: 615-636). The Cyt toxins were first discovered in B. thuringiensis subspecies israelensis (Goldberg et al. (1977) Mosq. News. 37: 355-358). There are 3 Cyt toxin families including 11 holotype toxins in the current nomenclature (Crickmore et al. (2014) Bacillus thuringiensis toxin nomenclature found on the world wide web at lifesci.sussex.ac.uk/home/Neil_Crickmore/Bt/). The majority of the B. thuringiensis isolates with cyt genes show activity against dipteran insects (particularly mosquitoes and black flies), but there are also cyt genes that have been described in B. thuringiensis strains targeting lepidopteran or coleopteran insects (Guerchicoff et al. (1997) Appl. Environ. Microbiol. 63: 2716-2721).

[0019] The structure of Cyt2A, solved by X-ray crystallography, shows a single domain where two outer layers of α-helix wrap around a mixed β-sheet. Further available crystal structures of Cyt toxins support a conserved α-β structural model with two α-helix hairpins flanking a β-sheet core containing seven to eight β-strands. (Cohen et al. (2011) J. Mol. Biol. 413: 80 4-814) Mutagenic studies identified β-sheet residues as critical for toxicity, while mutations in the helical domains did not affect toxicity (Adang et al.; Diversity of Bacillus thuringiensis Crystal Toxins and Mechanism of Action. In: T. S. Dhadialla and S. S. Gill, eds, Advances in Insect Physiology, Vol. 47, Oxford: Academic Press, 2014, pp. 39-87.) The representative domain of the Cyt toxin is a δ-endotoxin, Bac_thur_toxin (Pfam PF01338).

[0020] There are multiple proposed models for the mode of action of Cyt toxins, and it is still an area of active investigation. Some Cyt proteins (Cyt1A) have been shown to require the presence of accessory proteins for crystallization. Cyt1A and Cyt2A protoxins are processed by digestive proteases at the same sites in the N- and C-termini to a stable toxin core. Cyt toxins then interact with non-saturated membrane lipids, such as phosphatidylcholine, phosphatidylethanolamine, and sphingomyelin. For Cyt toxins, pore-formation and detergent-like membrane disruption have been proposed as non-exclusive mechanisms; and it is generally accepted that both may occur depending on toxin concentration, with lower concentrations favoring oligomeric pores and higher concentrations leading to membrane breaks. (Butko (2003) Appl. Environ. Microbiol. 69: 2415-2422) In the pore-formation model, the Cyt toxin binds to the cell membrane, inducing the formation of cation-selective channels in the membrane vesicles leading to colloid-osmotic lysis of the cell. (Knowles et al. (1989) FEBS Lett. 244: 259-262; Knowles et al. (1992) Proc. R. Soc. Ser. B. 248: 1-7 and Promdonkoy et al. (2003) Biochem. J. 374: 255-259). In the detergent model, there is a nonspecific aggregation of the toxin on the surface of the lipid bilayer leading to membrane disassembly and cell death. (Butko (2003) supra; Manceva et al. (2005) Biochem. 44: 589-597).

[0021] Multiple studies have shown synergistic activity between Cyt toxins and other B. thuringiensis toxins, particularly the Cry, Bin, and Mtx toxins. This synergism has even been shown to overcome an insect's resistance to the other toxin. (Wirth 1997, Wirth 2005, Thiery 1998, Zhang 2006) The Cyt synergistic effect for Cry toxins is proposed to involve Cyt1A binding to domain II of Cry toxins in solution or on the membrane plane to promote formation of a Cry toxin pre-pore oligomer. Formation of this oligomer is independent of the Cyt oligomerization, binding or insertion. (Lailak 2013, Perez 2007, Lopez-Diaz 2013)

[0022] A number of pesticidal proteins unrelated to the Cry proteins are produced by some strains of B. thuringiensis and B. cereus during vegetative growth (Estruch et al. (1996) Proc Natl Acad Sci USA 93:5389-5394; Warren et al. (1994) WO 94/21795). These vegetative insecticidal proteins, or Vips, do not form parasporal crystal proteins and are apparently secreted from the cell. The Vips are presently excluded from the Cry protein nomenclature because they are not crystal-forming proteins. The term VIP is a misnomer in the sense that some B. thuringiensis Cr proteins are also produced during vegetative growth as well as during the stationary and sporulation phases, most notably Cry3Aa. The location of the Vip genes in the B. thuringiensis genome has been reported to reside on large plasmids that also encode cry genes (Mesrati et al. (2005) FEMS Microbiol. Lett. 244(2):353-8). A web-site for the nomenclature of Bt toxins can be found on the world wide web at lifesci.sussex.ac.uk with the path “/home/Neil_Crickmore/Bt/” and at: “btnomenclature.info/”. See also, Schnepf et al. (1998) Microbiol. Mol. Biol. Rev. 62(3):775-806. Such references are herein incorporated by reference.

[0023] To date four categories of Vips have been identified. Some Vip genes form binary two-component protein complexes; an “A” component is usually the “active” portion, and a “B” component is usually the “binding” portion. (Pfam pfam.xfam.org/family/PF03495). The Vip1 and Vip4 proteins generally contain binary toxin B protein domains. Vip2 proteins generally contain binary toxin A protein domains.

[0024] The Vip1 and Vip2 proteins are the two components of a binary toxin that exhibits toxicity to coleopterans. Vip1Aa1 and Vip2Aa1 are very active against corn rootworms, particularly Diabrotica virgifera and Diabrotica longicornis (Han et al. (1999) Nat. Struct. Biol. 6:932-936; Warren GW (1997) “Vegetative insecticidal proteins: novel proteins for control of corn pests” In: Carozzi N B, Koziel M (eds) Advances in insect control, the role of transgenic plants; Taylor & Francis Ltd, London, pp 109-21). The membrane-binding 95 kDa Vip1 multimer provides a pathway for the 52 kDa vip2 ADP-ribosylase to enter the cytoplasm of target western corn rootworm cells (Warren (1997) supra). The NAD-dependent ADP-ribosyltransferase Vip2 likely modifies monomeric actin at Arg177 to block polymerization, leading to loss of the actin cytoskeleton and eventual cell death due to the rapid subunit ex-change within actin filaments in vivo (Carlier M. F. (1990) Adv. Biophys. 26:51-73).

[0025] Like Cry toxins, activated Vip3A toxins are pore-forming proteins capable of making stable ion channels in the membrane (Lee et al. (2003) Appl. Environ. Microbiol. 69:4648-4657). Vip3 proteins are active against several major lepidopteran pests (Rang et al. (2005) Appl. Environ. Microbiol. 71(10):6276-6281; Bhalla et al. (2005) FEMS Microbiol. Lett. 243:467-472; Estruch et al. (1998) WO 9844137; Estruch et al. (1996) Proc Natl Acad Sci USA 93:5389-5394; Selvapandiyan et al. (2001) Appl. Environ Microbiol. 67:5855-5858; Yu et al. (1997) Appl. Environ Microbiol. 63:532-536). Vip3A is active against Agrotis ipsilon, Spodoptera frugiperda, Spodoptera exigua, Heliothis virescens, and Helicoverpa zea (Warren et al. (1996) WO 96/10083; Estruch et al. (1996) Proc Natl Acad Sci USA 93:5389-5394) Like Cry toxins, Vip3A proteins must be activated by proteases prior to recognition at the surface of the midgut epithelium of specific membrane proteins different from those recognized by Cry toxins.

[0026] The MTX family of toxin proteins is characterized by the presence of a conserved domain, ETX_MTX2 (pfam 03318). Members of this family share sequence homology with the mosquitocidal toxins Mtx2 and Mtx3 from Bacillus sphaericus, as well as with the epsilon toxin ETX from Clostridium perfringens (Cole et al. (2004) Nat. Struct. Mol. Biol. 11: 797-8; Thanabalu et al. (1996) Gene 170:85-9). The MTX-like proteins are structurally distinct from the three-domain Cry toxins, as they have an elongated and predominately β-sheet-based structure. However, similar to the three-domain toxins, the MTX-like proteins are thought to form pores in the membranes of target cells (Adang et al. (2014) supra). Unlike the three-domain Cry proteins, the MTX-like proteins are much smaller in length, ranging from 267 amino acids (Cry23) to 340 amino acids (Cry15A. To date, only 15 proteins belonging to the family of MTX-like toxins have been assigned Cry names, making this a relatively small class compared to the three-domain Cry family (Crickmore et al. (2014) supra; Adang et al. (2014) supra). The members of the MTX-like toxin family include Cry15, Cry23, Cry33, Cry38, Cry45, Cry46, Cry51, Cry60A, Cry60B, and Cry64. This family exhibits a range of insecticidal activity, including activity against insect pests of the Lepidopteran and Coleopteran orders. Some members of this family may form binary partnerships with other proteins, which may or may not be required for insecticidal activity.

[0027] Cry15 is a 34 kDA protein that was identified in Bacillus thuringiensis serovar thompsoni HD542; it occurs naturally in a crystal together with an unrelated protein of approximately 40 kDa. The gene encoding Cry15 and its partner protein are arranged together in an operon. Cry15 alone has been shown to have activity against lepidopteran insect pests including Manduca sexta, Cydia pomonella, and Pieris rapae, with the presence of the 40 kDA protein having been shown to increase activity of Cry15 only against C. pomonella (Brown K. and Whiteley H. (1992) J. Bacteriol. 174:549-557; Naimov et al. (2008) Appl. Environ. Microbiol. 74:7145-7151). Further studies are needed to elucidate the function of the partner protein of Cry15. Similarly, Cry23 is a 29 kDA protein that has been shown to have activity against the coleopteran pests Tribolium castaneum and Popillia japonica together with its partner protein Cry37 (Donovan et al. (2000) U.S. Pat. No. 6,063,756).

[0028] New members of the MTX-like family are continuing to be identified. An ETX_MTX toxin gene was recently identified in the genome of Bacillus thuringiensis serovar tolworthi strain Na205-3. This strain was found to be toxic against the lepidpoteran pest Helicoverpa armigera, and it also contained homologs of Cry1, Cry11, Vip1, Vip2, and Vip3 (Palma et al. (2014) Genome Announc. 2(2): e00187-14. Published online Mar. 13, 2014 at doi: 10.1128/genomeA.00187-14; PMCID: PMC3953196). Because the MTX-like proteins have a unique domain structure relative to the three-domain Cry proteins, they are believed to possess a unique mode of action, thereby making them a valuable tool in insect control and the fight against insect resistance.

[0029] Bacterial cells produce large numbers of toxins with diverse specificity against host and non-host organisms. Large families of binary toxins have been identified in numerous bacterial families, including toxins that have activity against insect pests. (Poopathi and Abidha (2010) J. Physiol. Path. 1(3): 22-38). Lysinibacillus sphaericus (Ls), formerly Bacillus sphaericus, (Ahmed et al. (2007) Int. J. Syst. Evol. Microbiol. 57:1117-1125) is well-known as an insect biocontrol strain. Ls produces several insecticidal proteins, including the highly potent binary complex BinA/BinB. This binary complex forms a parasporal crystal in Ls cells and has strong and specific activity against dipteran insects, specifically mosquitos. In some areas, insect resistance to existing Ls mosquitocidal strains has been reported. The discovery of new binary toxins with different target specificity or the ability to overcome insect resistance is of significant interest.

[0030] The Ls binary insecticidal protein complex contains two major polypeptides, a 42 kDa polypeptide and a 51 kDa polypepdide, designated BinA and BinB, respectively (Ahmed et al. (2007) supra). The two polypeptides act synergistically to confer toxicity to their targets. Mode of action involves binding of the proteins to receptors in the larval midgut. In some cases, the proteins are modified by protease digestion in the larval gut to produce activated forms. The BinB component is thought to be involved in binding, while the BinA component confers toxicity (Nielsen-LeRoux et al. (2001) Appl. Environ. Microbiol. 67(11):5049-5054). When cloned and expressed separately, the BinA component is toxic to mosquito larvae, while the BinB component is not. However, co-administration of the proteins markedly increases toxicity (Nielsen-LeRoux et al. (2001) supra).

[0031] A small number of Bin protein homologs have been described from bacterial sources. Priest et al. (1997) Appl. Environ. Microbiol. 63(4):1195-1198 describe a hybridization effort to identify new Ls strains, although most of the genes they identified encoded proteins identical to the known BinA/BinB proteins. The BinA protein contains a defined conserved domain known as the Toxin 10 superfamily domain. This toxin domain was originally defined by its presence in BinA and BinB. The two proteins both have the domain, although the sequence similarity between BinA and BinB is limited in this region (<40%). The Cry49Aa protein, which also has insecticidal activity, also has this domain (described below).

[0032] The Cry48Aa/Cry49Aa binary toxin of Ls has the ability to kill Culex quinquefasciatus mosquito larvae. These proteins are in a protein structural class that has some similarity to the Cry protein complex of Bacillus thuringiensis (Bt), a well-known insecticidal protein family. The Cry34/Cry35 binary toxin of Bt is also known to kill insects, including Western corn rootworm, a significant pest of corn. Cry34, of which several variants have been identified, is a small (14 kDa) polypeptide, while Cry35 (also encoded by several variants) is a 44 kDa polypeptide. These proteins have some sequence homology with the BinA/BinB protein group and are thought to be evolutionarily related (Ellis et al. (2002) Appl. Environ. Microbiol. 68(3):1137-1145).

[0033] Phosphoinositide phospholipase C proteins (PI-PLC; also phosphotidylinositol phospholipase C) are members of the broader group of phospholipase C proteins. Many of these proteins play important roles in signal transduction as part of normal cell physiology. Several important bacterial toxins also contain domains with similarity to these proteins (Titball, R. W. (1993) Microbiological Reviews. 57(2):347-366). Importantly, these proteins are implicated in signal amplification during intoxication of insect cells by Bt Cry proteins (Valaitis, A. P. (2008) Insect Biochemistry and Molecular Biology. 38: 611-618).

[0034] The PI-PLC toxin class occurs in Bacillus isolates, commonly seen in co-occurrence with homologs to other described toxin classes, such as Binary Toxins. This class of sequences has homology to phosphatidylinositol phosphodiesterases (also referred to as phosphatidylinositol-specific phospholipase C-PI-PLC). The crystal structure and its active site were solved for B. cereus PI-PLC by Heinz et al (Heinz, et. al., (1995) The EMBO Journal. 14(16): 3855-3863). The roles of the B. cereus PI-PLC active site amino acid residues in catalysis and substrate binding were investigated by Gassier et al using site-directed mutagenesis, kinetics, and crystal structure analysis (Gassier, et. al., (1997) Biochemistry. 36(42):12802-13).

[0035] These PI-PLC toxin proteins contain a PLC-like phosphodiesterase, TIM beta/alpha-barrel domain (IPR017946) and/or a Phospholipase C, phosphatidylinositol-specific, X domain (IPR000909) (also referred to as the PI-PLC X-box domain). We have also seen proteins with these domains in combination with other typical Bacillus protein toxin domains. This list includes most commonly a lectin domain (IPR000772), a sugar-binding domain that can be present in one or more copies and is thought to bind cell membranes, as well as the Insecticidal crystal toxin (IPR008872) (also referred to as Toxin10 or P42), which is the defining domain of the Binary Toxin.

[0036] Previously, toxins of this PI-PLC class were defined in U.S. Pat. No. 8,318,900 B2 SEQ ID NOs 30 (DNA) and 79 (amino acid), in U.S. Patent Publication No. 20110263488A1 SEQ ID NOs 8 (DNA) and 9 (amino acid), and in U.S. Pat. No. 8,461,421B2 SEQ ID NOs 3 (DNA) and 63 (amino acid).

[0037] Provided herein are pesticidal proteins from these classes of toxins. The pesticidal proteins are classified by their structure, homology to known toxins and/or their pesticidal specificity.

[0038] ii. Variants and Fragments of Pesticidal Proteins and Polynucleotides Encoding the Same

[0039] Pesticidal proteins or polypeptides of the invention include those set forth in SEQ ID NOs: 1, 2, 3, 4, 5, 6, 7, 8, 9, 10, 11, 12, 13, 14, 15, 16, 17, 18, 19, 20, 21, 22, 23, 24, 25, 26, 27, 28, 29, 30, 31, 32, 33, 34, 35, 36, 37, 38, 39, 40, 41, 42, 43, 44, 45, 46, 47, 48, 49, 50, 51, 52, 53, 54, 55, 56, 57, 58, 59, 60, 61, 62, 63, 64, 65, 66, 67, 68, 69, 70, 71, 72, 73, 74, 75, 76, 77, 78, 79, 80, 81, 82, 83, 84, 85, 86, 87, 88, 89, 90, 91, 92, 93, 94, 95, 96, 97, 98, 99, 100, 101, 102, 103, 104, 105, 106, 107, 108, 109, 110, 111, 112, 113, 114, 115, 116, 117, 118, 119, 120, 121, 122, 123, 124, 125, 126, 127, 128, 129, 130, 131, 132, 133, 134, 135, 136, 137, 138, 139, 140, 141, 142, 143, 144, 145, 146, 147, 148, 149, 150, 151, 152, 153, 154, 155, 156, 157, 158, 159, 160, 161, 162, 163, 164, 165, 166, 167, 168, 169, 170, 171, 172, 173, 174, 175, 176, 177, 178, 179, 180, 181, 182, 183, 184, 185, 186, 187, 188, 189, 190, 191, 192, 193, 194, 195, 196, 197, 198, 199, 200, 201, 202, 203, 204, 205, 206, 207, 208, 209, 210, 211, 212, 213, 214, 215, 216, 217, 218, 219, 220, 221, 222, 223, 224, 225, 226, 227, 228, 229, 230, 231, 232, 233, 234, 235, 236, 237, 238, 239, 240, 241, 242, 243, 244, 245, 246, 247, 248, 249, 250, 251, 252, 253, 254, 255, 256, 257, 258, 259, 260, 261, 262, 263, 264, 265, 266, 267, 268, 269, 270, 271, 272, 273, 274, 275, 276, 277, 278, 279, 280, 281, 282, 283, 284, 285, 286, 287, 288, 289, 290, 291, 292, 293, 294, 295, 296, 297, 298, 299, 300, 301, 302, 303, 304, 305, 306, 307, 308, 309, 310, 311, 312, 313, 314, 315, 316, 317, 318, 319, 320, 321, 322, 323, 324, 325, 326, 327, 328, 329, 330, 331, 332, 333, 334, 335, 336, 337, 338, 339, 340, 341, 342, 343, 344, 345, 346, 347, 348, 349, 350, 351, 352, 353, 354, 355, 356, 357, 358, 359, 360, 361, 362, 363, 364, 365, 366, 367, 368, 369, 370, 371, 372, 373, 374, 375, 376, 377, 378, 379, 380, 381, 382, 383, 384, 385, 386, 387, 388, 389, 390, 391, 392, and/or 393 and fragments and variants thereof. By “pesticidal toxin” or “pesticidal protein” or “pesticidal polypeptide” is intended a toxin or protein or polypeptide that has activity against one or more pests, including, insects, fungi, nematodes, and the like such that the pest is killed or controlled.

[0040] An “isolated” or “purified” polypeptide or protein, or biologically active portion thereof, is substantially or essentially free from components that normally accompany or interact with the polypeptide or protein as found in its naturally occurring environment. Thus, an isolated or purified polypeptide or protein is substantially free of other cellular material, or culture medium when produced by recombinant techniques, or substantially free of chemical precursors or other chemicals when chemically synthesized. A protein that is substantially free of cellular material includes preparations of protein having less than about 30%, 20%, 10%, 5%, or 1% (by dry weight) of contaminating protein. When the protein of the invention or biologically active portion thereof is recombinantly produced, optimally culture medium represents less than about 30%, 20%, 10%, 5%, or 1% (by dry weight) of chemical precursors or non-protein-of-interest chemicals.

[0041] The term “fragment” refers to a portion of a polypeptide sequence of the invention. “Fragments” or “biologically active portions” include polypeptides comprising a sufficient number of contiguous amino acid residues to retain the biological activity, i.e., have pesticidal activity. Fragments of the pesticidal proteins include those that are shorter than the full-length sequences, either due to the use of an alternate downstream start site, or due to processing that produces a shorter protein having pesticidal activity. Processing may occur in the organism the protein is expressed in, or in the pest after ingestion of the protein. Examples of fragments of the proteins can be found in Table 1. A biologically active portion of a pesticidal protein can be a polypeptide that is, for example, 10, 25, 50, 100, 150, 200, 250 or more amino acids in length of any one of SEQ ID NO: 1, 2, 3, 4, 5, 6, 7, 8, 9, 10, 11, 12, 13, 14, 15, 16, 17, 18, 19, 20, 21, 22, 23, 24, 25, 26, 27, 28, 29, 30, 31, 32, 33, 34, 35, 36, 37, 38, 39, 40, 41, 42, 43, 44, 45, 46, 47, 48, 49, 50, 51, 52, 53, 54, 55, 56, 57, 58, 59, 60, 61, 62, 63, 64, 65, 66, 67, 68, 69, 70, 71, 72, 73, 74, 75, 76, 77, 78, 79, 80, 81, 82, 83, 84, 85, 86, 87, 88, 89, 90, 91, 92, 93, 94, 95, 96, 97, 98, 99, 100, 101, 102, 103, 104, 105, 106, 107, 108, 109, 110, 111, 112, 113, 114, 115, 116, 117, 118, 119, 120, 121, 122, 123, 124, 125, 126, 127, 128, 129, 130, 131, 132, 133, 134, 135, 136, 137, 138, 139, 140, 141, 142, 143, 144, 145, 146, 147, 148, 149, 150, 151, 152, 153, 154, 155, 156, 157, 158, 159, 160, 161, 162, 163, 164, 165, 166, 167, 168, 169, 170, 171, 172, 173, 174, 175, 176, 177, 178, 179, 180, 181, 182, 183, 184, 185, 186, 187, 188, 189, 190, 191, 192, 193, 194, 195, 196, 197, 198, 199, 200, 201, 202, 203, 204, 205, 206, 207, 208, 209, 210, 211, 212, 213, 214, 215, 216, 217, 218, 219, 220, 221, 222, 223, 224, 225, 226, 227, 228, 229, 230, 231, 232, 233, 234, 235, 236, 237, 238, 239, 240, 241, 242, 243, 244, 245, 246, 247, 248, 249, 250, 251, 252, 253, 254, 255, 256, 257, 258, 259, 260, 261, 262, 263, 264, 265, 266, 267, 268, 269, 270, 271, 272, 273, 274, 275, 276, 277, 278, 279, 280, 281, 282, 283, 284, 285, 286, 287, 288, 289, 290, 291, 292, 293, 294, 295, 296, 297, 298, 299, 300, 301, 302, 303, 304, 305, 306, 307, 308, 309, 310, 311, 312, 313, 314, 315, 316, 317, 318, 319, 320, 321, 322, 323, 324, 325, 326, 327, 328, 329, 330, 331, 332, 333, 334, 335, 336, 337, 338, 339, 340, 341, 342, 343, 344, 345, 346, 347, 348, 349, 350, 351, 352, 353, 354, 355, 356, 357, 358, 359, 360, 361, 362, 363, 364, 365, 366, 367, 368, 369, 370, 371, 372, 373, 374, 375, 376, 377, 378, 379, 380, 381, 382, 383, 384, 385, 386, 387, 388, 389, 390, 391, 392, and/or 393. Such biologically active portions can be prepared by recombinant techniques and evaluated for pesticidal activity. As used here, a fragment comprises at least 8 contiguous amino acids of SEQ ID NOs: 1, 2, 3, 4, 5, 6, 7, 8, 9, 10, 11, 12, 13, 14, 15, 16, 17, 18, 19, 20, 21, 22, 23, 24, 25, 26, 27, 28, 29, 30, 31, 32, 33, 34, 35, 36, 37, 38, 39, 40, 41, 42, 43, 44, 45, 46, 47, 48, 49, 50, 51, 52, 53, 54, 55, 56, 57, 58, 59, 60, 61, 62, 63, 64, 65, 66, 67, 68, 69, 70, 71, 72, 73, 74, 75, 76, 77, 78, 79, 80, 81, 82, 83, 84, 85, 86, 87, 88, 89, 90, 91, 92, 93, 94, 95, 96, 97, 98, 99, 100, 101, 102, 103, 104, 105, 106, 107, 108, 109, 110, 111, 112, 113, 114, 115, 116, 117, 118, 119, 120, 121, 122, 123, 124, 125, 126, 127, 128, 129, 130, 131, 132, 133, 134, 135, 136, 137, 138, 139, 140, 141, 142, 143, 144, 145, 146, 147, 148, 149, 150, 151, 152, 153, 154, 155, 156, 157, 158, 159, 160, 161, 162, 163, 164, 165, 166, 167, 168, 169, 170, 171, 172, 173, 174, 175, 176, 177, 178, 179, 180, 181, 182, 183, 184, 185, 186, 187, 188, 189, 190, 191, 192, 193, 194, 195, 196, 197, 198, 199, 200, 201, 202, 203, 204, 205, 206, 207, 208, 209, 210, 211, 212, 213, 214, 215, 216, 217, 218, 219, 220, 221, 222, 223, 224, 225, 226, 227, 228, 229, 230, 231, 232, 233, 234, 235, 236, 237, 238, 239, 240, 241, 242, 243, 244, 245, 246, 247, 248, 249, 250, 251, 252, 253, 254, 255, 256, 257, 258, 259, 260, 261, 262, 263, 264, 265, 266, 267, 268, 269, 270, 271, 272, 273, 274, 275, 276, 277, 278, 279, 280, 281, 282, 283, 284, 285, 286, 287, 288, 289, 290, 291, 292, 293, 294, 295, 296, 297, 298, 299, 300, 301, 302, 303, 304, 305, 306, 307, 308, 309, 310, 311, 312, 313, 314, 315, 316, 317, 318, 319, 320, 321, 322, 323, 324, 325, 326, 327, 328, 329, 330, 331, 332, 333, 334, 335, 336, 337, 338, 339, 340, 341, 342, 343, 344, 345, 346, 347, 348, 349, 350, 351, 352, 353, 354, 355, 356, 357, 358, 359, 360, 361, 362, 363, 364, 365, 366, 367, 368, 369, 370, 371, 372, 373, 374, 375, 376, 377, 378, 379, 380, 381, 382, 383, 384, 385, 386, 387, 388, 389, 390, 391, 392, and/or 393.

[0042] Bacterial genes, including those encoding the pesticidal proteins disclosed herein, quite often possess multiple methionine initiation codons in proximity to the start of the open reading frame. Often, translation initiation at one or more of these start codons will lead to generation of a functional protein. These start codons can include ATG codons. However, bacteria such as Bacillus sp. also recognize the codon GTG as a start codon, and proteins that initiate translation at GTG codons contain a methionine at the first amino acid. On rare occasions, translation in bacterial systems can initiate at a TTG codon, though in this event the TTG encodes a methionine. Furthermore, it is not often determined a priori which of these codons are used naturally in the bacterium. Thus, it is understood that use of one of the alternate methionine codons may also lead to generation of pesticidal proteins. These pesticidal proteins are encompassed in the present invention and may be used in the methods disclosed herein. It will be understood that, when expressed in plants, it will be necessary to alter the alternate start codon to ATG for proper translation.

[0043] In various embodiments the pesticidal proteins provided herein include amino acid sequences deduced from the full-length nucleotide sequences and amino acid sequences that are shorter than the full-length sequences due to the use of an alternate downstream start site. Thus, the nucleotide sequence of the invention and/or vectors, host cells, and plants comprising the nucleotide sequence of the invention (and methods of making and using the nucleotide sequence of the invention) may comprise a nucleotide sequence encoding an alternate start site.

[0044] It is recognized that modifications may be made to the pesticidal polypeptides provided herein creating variant proteins. Changes designed by man may be introduced through the application of site-directed mutagenesis techniques. Alternatively, native, as yet-unknown or as yet unidentified polynucleotides and/or polypeptides structurally and/or functionally-related to the sequences disclosed herein may also be identified that fall within the scope of the present invention. Conservative amino acid substitutions may be made in nonconserved regions that do not alter the function of the pesticidal proteins. Alternatively, modifications may be made that improve the activity of the toxin. Modification of Cry toxins by domain III swapping has resulted in some cases in hybrid toxins with improved toxicities against certain insect species. Thus, domain III swapping could be an effective strategy to improve toxicity of Cry toxins or to create novel hybrid toxins with toxicity against pests that show no susceptibility to the parental Cry toxins. Site-directed mutagenesis of domain II loop sequences may result in new toxins with increased insecticidal activity. Domain II loop regions are key binding regions of initial Cry toxins that are suitable targets for the mutagenesis and selection of Cry toxins with improved insecticidal properties. Domain I of the Cry toxin may be modified to introduce protease cleavage sites to improve activity against certain pests. Strategies for shuffling the three different domains among large numbers of cry genes and high through output bioassay screening methods may provide novel Cry toxins with improved or novel toxicities.

[0045] As indicated, fragments and variants of the polypeptides disclosed herein will retain pesticidal activity. Pesticidal activity comprises the ability of the composition to achieve an observable effect diminishing the occurrence or an activity of the target pest, including for example, bringing about death of at least one pest, or a noticeable reduction in pest growth, feeding, or normal physiological development. Such decreases in numbers, pest growth, feeding or normal development can comprise any statistically significant decrease, including, for example a decrease of about 5%, 10%, 15%, 20%, 25%, 30%, 35%, 40%, 45%, 50%, 55%, 60%, 65%, 70%, 75%, 85%, 90%, 95% or greater. The pesticidal activity against one or more of the various pests provided herein, including, for example, pesticidal activity against Coleoptera, Diptera, Hymenoptera, Lepidoptera, Mallophaga, Homoptera, Hemiptera, Orthroptera, Nematodes, Thysanoptera, Dermaptera, Isoptera, Anoplura, Siphonaptera, Trichoptera, etc., or any other pest described herein. It is recognized that the pesticidal activity may be different or improved relative to the activity of the native protein, or it may be unchanged, so long as pesticidal activity is retained. Methods for measuring pesticidal activity are provide elsewhere herein. See also,Czapla and Lang (1990) J. Econ. Entomol. 83:2480-2485; Andrews et al. (1988) Biochem. J. 252:199-206; Marrone et al. (1985) J. of Economic Entomology 78:290-293; and U.S. Pat. No. 5,743,477, all of which are herein incorporated by reference in their entirety.

[0046] By “variants” is intended polypeptides having an amino acid sequence that is at least about 60%, about 65%, about 70%, about 75%, about 80%, about 85%, about 86%, about 87%, about 88%, about 89%, about 90%, about 91%, about 92%, about 93%, about 94%, about 95%, about 96%, about 97%, about 98% or about 99% identical to the amino acid sequence of any of SEQ ID NOs: 1, 2, 3, 4, 5, 6, 7, 8, 9, 10, 11, 12, 13, 14, 15, 16, 17, 18, 19, 20, 21, 22, 23, 24, 25, 26, 27, 28, 29, 30, 31, 32, 33, 34, 35, 36, 37, 38, 39, 40, 41, 42, 43, 44, 45, 46, 47, 48, 49, 50, 51, 52, 53, 54, 55, 56, 57, 58, 59, 60, 61, 62, 63, 64, 65, 66, 67, 68, 69, 70, 71, 72, 73, 74, 75, 76, 77, 78, 79, 80, 81, 82, 83, 84, 85, 86, 87, 88, 89, 90, 91, 92, 93, 94, 95, 96, 97, 98, 99, 100, 101, 102, 103, 104, 105, 106, 107, 108, 109, 110, 111, 112, 113, 114, 115, 116, 117, 118, 119, 120, 121, 122, 123, 124, 125, 126, 127, 128, 129, 130, 131, 132, 133, 134, 135, 136, 137, 138, 139, 140, 141, 142, 143, 144, 145, 146, 147, 148, 149, 150, 151, 152, 153, 154, 155, 156, 157, 158, 159, 160, 161, 162, 163, 164, 165, 166, 167, 168, 169, 170, 171, 172, 173, 174, 175, 176, 177, 178, 179, 180, 181, 182, 183, 184, 185, 186, 187, 188, 189, 190, 191, 192, 193, 194, 195, 196, 197, 198, 199, 200, 201, 202, 203, 204, 205, 206, 207, 208, 209, 210, 211, 212, 213, 214, 215, 216, 217, 218, 219, 220, 221, 222, 223, 224, 225, 226, 227, 228, 229, 230, 231, 232, 233, 234, 235, 236, 237, 238, 239, 240, 241, 242, 243, 244, 245, 246, 247, 248, 249, 250, 251, 252, 253, 254, 255, 256, 257, 258, 259, 260, 261, 262, 263, 264, 265, 266, 267, 268, 269, 270, 271, 272, 273, 274, 275, 276, 277, 278, 279, 280, 281, 282, 283, 284, 285, 286, 287, 288, 289, 290, 291, 292, 293, 294, 295, 296, 297, 298, 299, 300, 301, 302, 303, 304, 305, 306, 307, 308, 309, 310, 311, 312, 313, 314, 315, 316, 317, 318, 319, 320, 321, 322, 323, 324, 325, 326, 327, 328, 329, 330, 331, 332, 333, 334, 335, 336, 337, 338, 339, 340, 341, 342, 343, 344, 345, 346, 347, 348, 349, 350, 351, 352, 353, 354, 355, 356, 357, 358, 359, 360, 361, 362, 363, 364, 365, 366, 367, 368, 369, 370, 371, 372, 373, 374, 375, 376, 377, 378, 379, 380, 381, 382, 383, 384, 385, 386, 387, 388, 389, 390, 391, 392, and/or 393 and retain pesticidal activity.

[0047] A biologically active variant of a pesticidal polypeptide of the invention may differ by as few as about 1-15 amino acid residues, as few as about 1-10, such as about 6-10, as few as 5, as few as 4, as few as 3, as few as 2, or as few as 1 amino acid residue. In specific embodiments, the polypeptides can comprise an N-terminal or a C-terminal truncation, which can comprise at least a deletion of 10, 15, 20, 25, 30, 35, 40, 45, 50 amino acids or more from either the N or C terminal of the polypeptide.

[0048] Table 2 provides protein domains found in SEQ ID NOs: 1-393 based on PFAM data. Both the domain description and the positions within a given SEQ ID NO are provided in Table 2. In specific embodiments, the active variant comprising any one of SEQ ID NOs: 1-393 can comprise at least 70%, 75%, 76%, 77%, 78%, 79%, 80%, 81%, 82%, 83%, 84%, 85%, 86%, 87%, 88%, 89%, 90%, 91%, 92%, 93%, 94%, 95%, 96%, 97%, 98%, or 99% sequence identity to any one of SEQ ID NOs: 1, 2, 3, 4, 5, 6, 7, 8, 9, 10, 11, 12, 13, 14, 15, 16, 17, 18, 19, 20, 21, 22, 23, 24, 25, 26, 27, 28, 29, 30, 31, 32, 33, 34, 35, 36, 37, 38, 39, 40, 41, 42, 43, 44, 45, 46, 47, 48, 49, 50, 51, 52, 53, 54, 55, 56, 57, 58, 59, 60, 61, 62, 63, 64, 65, 66, 67, 68, 69, 70, 71, 72, 73, 74, 75, 76, 77, 78, 79, 80, 81, 82, 83, 84, 85, 86, 87, 88, 89, 90, 91, 92, 93, 94, 95, 96, 97, 98, 99, 100, 101, 102, 103, 104, 105, 106, 107, 108, 109, 110, 111, 112, 113, 114, 115, 116, 117, 118, 119, 120, 121, 122, 123, 124, 125, 126, 127, 128, 129, 130, 131, 132, 133, 134, 135, 136, 137, 138, 139, 140, 141, 142, 143, 144, 145, 146, 147, 148, 149, 150, 151, 152, 153, 154, 155, 156, 157, 158, 159, 160, 161, 162, 163, 164, 165, 166, 167, 168, 169, 170, 171, 172, 173, 174, 175, 176, 177, 178, 179, 180, 181, 182, 183, 184, 185, 186, 187, 188, 189, 190, 191, 192, 193, 194, 195, 196, 197, 198, 199, 200, 201, 202, 203, 204, 205, 206, 207, 208, 209, 210, 211, 212, 213, 214, 215, 216, 217, 218, 219, 220, 221, 222, 223, 224, 225, 226, 227, 228, 229, 230, 231, 232, 233, 234, 235, 236, 237, 238, 239, 240, 241, 242, 243, 244, 245, 246, 247, 248, 249, 250, 251, 252, 253, 254, 255, 256, 257, 258, 259, 260, 261, 262, 263, 264, 265, 266, 267, 268, 269, 270, 271, 272, 273, 274, 275, 276, 277, 278, 279, 280, 281, 282, 283, 284, 285, 286, 287, 288, 289, 290, 291, 292, 293, 294, 295, 296, 297, 298, 299, 300, 301, 302, 303, 304, 305, 306, 307, 308, 309, 310, 311, 312, 313, 314, 315, 316, 317, 318, 319, 320, 321, 322, 323, 324, 325, 326, 327, 328, 329, 330, 331, 332, 333, 334, 335, 336, 337, 338, 339, 340, 341, 342, 343, 344, 345, 346, 347, 348, 349, 350, 351, 352, 353, 354, 355, 356, 357, 358, 359, 360, 361, 362, 363, 364, 365, 366, 367, 368, 369, 370, 371, 372, 373, 374, 375, 376, 377, 378, 379, 380, 381, 382, 383, 384, 385, 386, 387, 388, 389, 390, 391, 392, and/or 393 and further comprises at least one of the conserved domain set forth in Table 2. For example, in one embodiment, the active variant will comprise at least 70%, 75%, 76%, 77%, 78%, 79%, 80%, 81%, 82%, 83%, 84%, 85%, 86%, 87%, 88%, 89%, 90%, 91%, 92%, 93%, 94%, 95%, 96%, 97%, 98%, or 99% sequence identity to SEQ ID NO:1, and further comprises the native amino acids at positions 209-398.

TABLE 2
Summary of PFAM domains in each of SEQ ID NOs: 1-393

| | Seq | Modification | | | | |
|---|---|---|---|---|---|---|
| APG ID | ID | Type | Accession | Description | Start | Stop |
| APG00709.0 | 1 | | PF05431 | Insecticidal Crystal Toxin, P42 | 209 | 398 |
| APG00709.1 | 2 | Signal | PF05431 | Insecticidal Crystal Toxin, P42 | 182 | 371 |
| | | peptide | | | | |
| | | removed | | | | |
| APG00858.0 | 3 | | PF03318 | Clostridium epsilon toxin | 81 | 213 |
| | | | | ETX/Bacillus mosquitocidal toxin | | |
| | | | | MTX2 | | |
| APG00858.1 | 4 | Signal | PF03318 | Clostridium epsilon toxin | 50 | 182 |
| | | peptide | | ETX/Bacillus mosquitocidal toxin | | |
| | | removed | | MTX2 | | |
| APG00871.0 | 5 | | PF03318 | Clostridium epsilon toxin | 68 | 264 |
| | | | | ETX/Bacillus mosquitocidal toxin | | |
| | | | | MTX2 | | |
| APG00932.0 | 6 | | no PFAM | | | |
| | | | domains | | | |
| APG00932.1 | 7 | Alternate | no PFAM | | | |
| | | start | domains | | | |
| APG00932 | 8 | | PF07029 | CryBP1 protein | 32 | 188 |
| CryBP1 | | | | | | |
| (APG02512.0) | | | | | | |
| APG00937.0 | 9 | | PF03945 | delta endotoxin, N-terminal | 76 | 328 |
| | | | | domain | | |
| | | | PF00555 | delta endotoxin | 334 | 531 |
| | | | PF03944 | delta endotoxin | 541 | 675 |
| APG00937.1 | 10 | 3′ Truncation | PF03945 | delta endotoxin, N-terminal | 76 | 328 |
| | | | | domain | | |
| | | | PF00555 | delta endotoxin | 334 | 531 |
| | | | PF03944 | delta endotoxin | 541 | 675 |
| APG00991.0 | 11 | | PF03318 | Clostridium epsilon toxin | 100 | 335 |
| | | | | ETX/Bacillus mosquitocidal toxin | | |
| | | | | MTX2 | | |
| APG00991.1 | 12 | Signal | PF03318 | Clostridium epsilon toxin | 71 | 306 |
| | | peptide | | ETX/Bacillus mosquitocidal toxin | | |
| | | removed | | MTX2 | | |
| APG01051.0 | 13 | | PF03318 | Clostridium epsilon toxin | 66 | 265 |
| | | | | ETX/Bacillus mosquitocidal toxin | | |
| | | | | MTX2 | | |
| APG01052.0 | 14 | | PF05791 | Bacillus haemolytic enterotoxin | 99 | 227 |
| | | | | (HBL) | | |
| APG01052.1 | 15 | Alternate | PF05791 | Bacillus haemolytic enterotoxin | 82 | 210 |
| | | start | | (HBL) | | |
| APG01059.0 | 16 | | PF05431 | Insecticidal Crystal Toxin, P42 | 188 | 377 |
| | | | | ETX/Bacillus mosquitocidal toxin | | |
| | | | | MTX2 | | |
| APG01443.1 | 34 | Signal | PF03318 | Clostridium epsilon toxin | 133 | 328 |
| | | peptide | | ETX/Bacillus mosquitocidal toxin | | |
| | | removed | | MTX2 | | |
| APG01446.0 | 35 | | PF03945 | delta endotoxin, N-terminal | 133 | 358 |
| | | | | domain | | |
| | | | PF03944 | delta endotoxin | 551 | 687 |
| APG01446.1 | 36 | Alternate | PF03945 | delta endotoxin, N-terminal | 115 | 340 |
| | | start | | domain | | |
| | | | PF03944 | delta endotoxin | 533 | 669 |
| APG01446.2 | 37 | Alternate | PF03945 | delta endotoxin, N-terminal | 115 | 340 |
| | | start and 3′ | | domain | | |
| | | Truncation | PF03944 | delta endotoxin | 533 | 669 |
| APG01446.3 | 38 | Signal | PF03945 | delta endotoxin, N-terminal | 85 | 310 |
| | | peptide | | domain | | |
| | | removed | PF03944 | delta endotoxin | 503 | 639 |
| APG01446.4 | 39 | Signal | PF03945 | delta endotoxin, N-terminal | 85 | 310 |
| | | peptide | | domain | | |
| | | removed and | PF03944 | delta endotoxin | 503 | 639 |
| | | 3′ Truncation | | | | |
| APG01679.0 | 40 | | PF03945 | delta endotoxin, N-terminal | 119 | 298 |
| | | | | domain | | |
| | | | PF01473 | Putative cell wall binding repeat | 404 | 416 |
| APG01679.1 | 41 | Signal | PF03945 | delta endotoxin, N-terminal | 81 | 260 |
| | | peptide | | domain | | |
| | | removed | PF01473 | Putative cell wall binding repeat | 366 | 378 |
| | | | PF01473 | Putative cell wall binding repeat | 420 | 432 |
| APG01706.0 | 42 | | no PFAM | | | |
| | | | domains | | | |
| APG01778.0 | 43 | | PF05431 | Insecticidal Crystal Toxin, P42 | 13 | 131 |
| | | | PF13671 | AAA domain | 116 | 197 |
| APG01778.1 | 44 | Signal | PF05431 | Insecticidal Crystal Toxin, P42 | 3 | 109 |
| | | peptide | PF13671 | AAA domain | 94 | 175 |
| | | removed | | | | |
| APG01785.0 | 45 | | PF03318 | Clostridium epsilon toxin | 86 | 308 |
| | | | | ETX/Bacillus mosquitocidal toxin | | |
| | | | | MTX2 | | |
| APG01785.1 | 46 | Signal | PF03318 | Clostridium epsilon toxin | 59 | 281 |
| | | peptide | | ETX/Bacillus mosquitocidal toxin | | |
| | | removed | | MTX2 | | |
| APG01858.0 | 47 | | PF03318 | Clostridium epsilon toxin | 162 | 284 |
| | | | | ETX/Bacillus mosquitocidal toxin | | |
| | | | | MTX2 | | |
| APG01858.1 | 48 | Signal | PF03318 | Clostridium epsilon toxin | 133 | 256 |
| | | peptide | | ETX/Bacillus mosquitocidal toxin | | |
| | | removed | | MTX2 | | |
| APG01874.0 | 49 | | PF03318 | Clostridium epsilon toxin | 96 | 305 |
| | | | | ETX/Bacillus mosquitocidal toxin | | |
| | | | | MTX2 | | |
| APG01874.1 | 50 | Alternate | PF03318 | Clostridium epsilon toxin | 82 | 291 |
| | | start | | ETX/Bacillus mosquitocidal toxin | | |
| | | | | MTX2 | | |
| APG01874.2 | 51 | Signal | PF03318 | Clostridium epsilon toxin | 49 | 258 |
| | | peptide | | ETX/Bacillus mosquitocidal toxin | | |
| | | removed | | MTX2 | | |
| APG01883.0 | 52 | | PF03945 | delta endotoxin, N-terminal | 82 | 299 |
| | | | | domain | | |
| | | | PF00555 | delta endotoxin | 305 | 516 |
| | | | PF03944 | delta endotoxin | 526 | 660 |
| APG01883.1 | 53 | Alternate | PF03945 | delta endotoxin, N-terminal | 79 | 296 |
| | | start | | domain | | |
| | | | PF00555 | delta endotoxin | 302 | 513 |
| | | | PF03944 | delta endotoxin | 523 | 657 |
| APG01885.0 | 54 | | PF03318 | Clostridium epsilon toxin | 48 | 272 |
| | | | | ETX/Bacillus mosquitocidal toxin | | |
| | | | | MTX2 | | |
| APG01993.0 | 55 | | PF03318 | Clostridium epsilon toxin | 88 | 293 |
| | | | | ETX/Bacillus mosquitocidal toxin | | |
| | | | | MTX2 | | |
| APG01993.1 | 56 | Signal | PF03318 | Clostridium epsilon toxin | 53 | 259 |
| | | peptide | | ETX/Bacillus mosquitocidal toxin | | |
| | | removed | | MTX2 | | |
| APG02007.0 | 57 | | PF03318 | Clostridium epsilon toxin | 86 | 290 |
| | | | | ETX/Bacillus mosquitocidal toxin | | |
| | | | | MTX2 | | |
| APG02007.1 | 58 | Signal | PF03318 | Clostridium epsilon toxin | 54 | 264 |
| | | peptide | | ETX/Bacillus mosquitocidal toxin | | |
| | | removed | | MTX2 | | |
| APG02021.0 | 59 | | no PFAM | | | |
| | | | domains | | | |
| APG02021.1 | 60 | Alternate | no PFAM | | | |
| | | start | domains | | | |
| APG02027.0 | 61 | | PF05791 | Bacillus haemolytic enterotoxin | 66 | 199 |
| | | | | (HBL) | | |
| APG02031.0 | 62 | | PF07691 | PA14 domain | 53 | 177 |
| | | | PF03495 | Clostridial binary toxin | 203 | 607 |
| | | | | B/anthrax toxin PA | | |
| APG02068.0 | 63 | | PF03318 | Clostridium epsilon toxin | 38 | 272 |
| | | | | ETX/Bacillus mosquitocidal toxin | | |
| | | | | MTX2 | | |
| APG02083.0 | 64 | | no PFAM | | | |
| | | | domains | | | |
| APG02083.1 | 65 | Signal | no PFAM | | | |
| | | peptide | domains | | | |
| | | removed | | | | |
| APG02187.0 | 66 | | no PFAM | | | |
| | | | domains | | | |
| APG02187.1 | 67 | Signal | no PFAM | | | |
| | | peptide | domains | | | |
| | | removed | | | | |
| APG02242.0 | 68 | | PF03945 | delta endotoxin, N-terminal | 68 | 306 |
| | | | | domain | | |
| | | | PF03944 | delta endotoxin | 515 | 669 |
| APG02242.1 | 69 | 3′ Truncation | PF03945 | delta endotoxin, N-terminal | 68 | 306 |
| | | | | domain | | |
| | | | PF03944 | delta endotoxin | 515 | 669 |
| APG02277.0 | 70 | | PF03318 | Clostridium epsilon toxin | 42 | 248 |
| | | | | ETX/Bacillus mosquitocidal toxin | | |
| | | | | MTX2 | | |
| APG02278.0 | 71 | | PF07691 | PA14 domain | 16 | 140 |
| | | | PF03495 | Clostridial binary toxin | 186 | 598 |
| | | | | B/anthrax toxin PA | | |
| | | | PF09259 | Fungal immunomodulatory | 834 | 906 |
| | | | | protein Fve | | |
| APG02299.0 | 72 | | PF03945 | delta endotoxin, N-terminal | 71 | 319 |
| | | | | domain | | |
| | | | PF00555 | delta endotoxin | 325 | 529 |
| | | | PF03944 | delta endotoxin | 539 | 677 |
| APG02401.0 | 73 | | PF03318 | Clostridium epsilon toxin | 97 | 316 |
| | | | | ETX/Bacillus mosquitocidal toxin | | |
| | | | | MTX2 | | |
| APG02401.1 | 74 | Signal | PF03318 | Clostridium epsilon toxin | 62 | 281 |
| | | peptide | | ETX/Bacillus mosquitocidal toxin | | |
| | | removed | | MTX2 | | |
| APG02439.0 | 75 | | PF03945 | delta endotoxin, N-terminal | 65 | 237 |
| | | | | domain | | |
| APG02471.0 | 76 | | PF03318 | Clostridium epsilon toxin | 58 | 211 |
| | | | | ETX/Bacillus mosquitocidal toxin | | |
| | | | | MTX2 | | |
| APG02577.0 | 77 | | PF03318 | Clostridium epsilon toxin | 93 | 210 |
| | | | | ETX/Bacillus mosquitocidal toxin | | |
| | | | | MTX2 | | |
| APG02577.1 | 78 | Signal | PF03318 | Clostridium epsilon toxin | 55 | 172 |
| | | peptide | | ETX/Bacillus mosquitocidal toxin | | |
| | | removed | | MTX2 | | |
| APG02635.0 | 79 | | PF00388 | Phosphatidylinositol-specific | 54 | 199 |
| | | | | phospholipase C, X domain | | |
| APG02685.0 | 80 | | no PFAM | | | |
| | | | domains | | | |
| APG02761.0 | 81 | | PF05431 | Insecticidal Crystal Toxin, P42 | 253 | 446 |
| APG02761.1 | 82 | Alternate | PF05431 | Insecticidal Crystal Toxin, P42 | 211 | 404 |
| | | start | | | | |
| APG02761.2 | 83 | Signal | PF05431 | Insecticidal Crystal Toxin, P42 | 182 | 375 |
| | | peptide | | | | |
| | | removed | | | | |
| APG02776.0 | 84 | | PF03945 | delta endotoxin, N-terminal | 56 | 286 |
| | | | | domain | | |
| | | | PF00555 | delta endotoxin | 299 | 505 |
| | | | PF03944 | delta endotoxin | 516 | 647 |
| | | | PF14200 | Ricin-type beta-trefoil lectin | 697 | 793 |
| | | | | domain-like | | |
| APG02776.1 | 85 | 3′ Truncation | PF03945 | delta endotoxin, N-terminal | 56 | 286 |
| | | | | domain | | |
| | | | PF00555 | delta endotoxin | 299 | 505 |
| | | | PF03944 | delta endotoxin | 516 | 647 |
| APG02801.0 | 86 | | PF03318 | Clostridium epsilon toxin | 95 | 314 |
| | | | | ETX/Bacillus mosquitocidal toxin | | |
| | | | | MTX2 | | |
| APG02801.1 | 87 | Signal | PF03318 | Clostridium epsilon toxin | 65 | 284 |
| | | peptide | | ETX/Bacillus mosquitocidal toxin | | |
| | | removed | | MTX2 | | |
| APG02808.0 | 88 | | PF03318 | Clostridium epsilon toxin | 117 | 307 |
| | | | | ETX/Bacillus mosquitocidal toxin | | |
| | | | | MTX2 | | |
| APG02808.1 | 89 | Alternate | PF03318 | Clostridium epsilon toxin | 113 | 303 |
| | | start | | ETX/Bacillus mosquitocidal toxin | | |
| | | | | MTX2 | | |
| APG02808.2 | 90 | Signal | PF03318 | Clostridium epsilon toxin | 83 | 273 |
| | | peptide | | ETX/Bacillus mosquitocidal toxin | | |
| | | removed | | MTX2 | | |
| APG02955.0 | 91 | | PF05431 | Insecticidal Crystal Toxin, P42 | 202 | 391 |
| APG02955.1 | 92 | Signal | PF05431 | Insecticidal Crystal Toxin, P42 | 175 | 364 |
| | | peptide | | | | |
| | | removed | | | | |
| APG02963.0 | 93 | | PF03318 | Clostridium epsilon toxin | 66 | 292 |
| | | | | ETX/Bacillus mosquitocidal toxin | | |
| | | | | MTX2 | | |
| APG02963.1 | 94 | Signal | PF03318 | Clostridium epsilon toxin | 42 | 268 |
| | | peptide | | ETX/Bacillus mosquitocidal toxin | | |
| | | removed | | MTX2 | | |
| APG02970.0 | 95 | | PF03318 | Clostridium epsilon toxin | 113 | 303 |
| | | | | ETX/Bacillus mosquitocidal toxin | | |
| | | | | MTX2 | | |
| APG02970.1 | 96 | Signal | PF03318 | Clostridium epsilon toxin | 83 | 273 |
| | | peptide | | ETX/Bacillus mosquitocidal toxin | | |
| | | removed | | MTX2 | | |
| APG02980.0 | 97 | | PF03318 | Clostridium epsilon toxin | 100 | 297 |
| | | | | ETX/Bacillus mosquitocidal toxin | | |
| | | | | MTX2 | | |
| APG02980.1 | 98 | Signal | PF03318 | Clostridium epsilon toxin | 74 | 271 |
| | | peptide | | ETX/Bacillus mosquitocidal toxin | | |
| | | removed | | MTX2 | | |
| APG03124.0 | 99 | | PF03945 | delta endotoxin, N-terminal | 70 | 313 |
| | | | | domain | | |
| | | | PF00555 | delta endotoxin | 319 | 526 |
| | | | PF03944 | delta endotoxin | 536 | 672 |
| APG03124 | 100 | | PF07029 | CryBP1 protein | 38 | 190 |
| CryBP1 | | | | | | |
| (APG01090.0) | | | | | | |
| APG03192.0 | 101 | | PF03318 | Clostridium epsilon toxin | 155 | 367 |
| | | | | ETX/Bacillus mosquitocidal toxin | | |
| | | | | MTX2 | | |
| APG03192.1 | 102 | Signal | PF03318 | Clostridium epsilon toxin | 124 | 336 |
| | | peptide | | ETX/Bacillus mosquitocidal toxin | | |
| | | removed | | MTX2 | | |
| APG03223.0 | 103 | | PF05431 | Insecticidal Crystal Toxin, P42 | 205 | 397 |
| APG03223.1 | 104 | Signal | PF05431 | Insecticidal Crystal Toxin, P42 | 178 | 370 |
| | | peptide | | | | |
| | | removed | | | | |
| APG03444.0 | 105 | | PF03318 | Clostridium epsilon toxin | 110 | 317 |
| | | | | ETX/Bacillus mosquitocidal toxin | | |
| | | | | MTX2 | | |
| APG03444.1 | 106 | Signal | PF03318 | Clostridium epsilon toxin | 77 | 284 |
| | | peptide | | ETX/Bacillus mosquitocidal toxin | | |
| | | removed | | MTX2 | | |
| APG03497.0 | 107 | | PF05431 | Insecticidal Crystal Toxin, P42 | 144 | 329 |
| APG03506.0 | 108 | | PF03318 | Clostridium epsilon toxin | 87 | 298 |
| | | | | ETX/Bacillus mosquitocidal toxin | | |
| | | | | MTX2 | | |
| APG03506.1 | 109 | Signal | PF03318 | Clostridium epsilon toxin | 56 | 267 |
| | | peptide | | ETX/Bacillus mosquitocidal toxin | | |
| | | removed | | MTX2 | | |
| APG03543.0 | 110 | | PF03318 | Clostridium epsilon toxin | 75 | 212 |
| | | | | ETX/Bacillus mosquitocidal toxin | | |
| | | | | MTX2 | | |
| APG03543.1 | 111 | Signal | PF03318 | Clostridium epsilon toxin | 44 | 181 |
| | | peptide | | ETX/Bacillus mosquitocidal toxin | | |
| | | removed | | MTX2 | | |
| APG03593.0 | 112 | | PF03318 | Clostridium epsilon toxin | 55 | 196 |
| | | | | ETX/Bacillus mosquitocidal toxin | | |
| | | | | MTX2 | | |
| APG03593.1 | 113 | Signal | PF03318 | Clostridium epsilon toxin | 30 | 171 |
| | | peptide | | ETX/Bacillus mosquitocidal toxin | | |
| | | removed | | MTX2 | | |
| APG03601.0 | 114 | | PF03318 | Clostridium epsilon toxin | 166 | 292 |
| | | | | ETX/Bacillus mosquitocidal toxin | | |
| | | | | MTX2 | | |
| APG03638.0 | 115 | | PF03318 | Clostridium epsilon toxin | 98 | 236 |
| | | | | ETX/Bacillus mosquitocidal toxin | | |
| | | | | MTX2 | | |
| APG03638.1 | 116 | Signal | PF03318 | Clostridium epsilon toxin | 68 | 206 |
| | | peptide | | ETX/Bacillus mosquitocidal toxin | | |
| | | removed | | MTX2 | | |
| APG03701.0 | 117 | | PF03318 | Clostridium epsilon toxin | 83 | 296 |
| | | | | ETX/Bacillus mosquitocidal toxin | | |
| | | | | MTX2 | | |
| APG03791.0 | 118 | | PF07691 | PA14 domain | 52 | 178 |
| | | | PF03495 | Clostridial binary toxin | 219 | 634 |
| | | | | B/anthrax toxin PA | | |
| APG03791.1 | 119 | Alternate | PF07691 | PA14 domain | 49 | 175 |
| | | start | PF03495 | Clostridial binary toxin | 216 | 631 |
| | | | | B/anthrax toxin PA | | |
| APG03791.2 | 120 | Signal | PF07691 | PA14 domain | 22 | 148 |
| | | peptide | PF03495 | Clostridial binary toxin | 189 | 604 |
| | | removed | | B/anthrax toxin PA | | |
| APG03964.0 | 121 | | PF14200 | Ricin-type beta-trefoil lectin | 40 | 141 |
| | | | | domain-like | | |
| | | | PF05431 | Insecticidal Crystal Toxin, P42 | 323 | 508 |
| APG04004.0 | 122 | | PF00652 | Ricin-type beta-trefoil lectin | 17 | 138 |
| | | | | domain | | |
| | | | PF05431 | Insecticidal Crystal Toxin, P42 | 149 | 350 |
| APG04008.0 | 123 | | PF00388 | Phosphatidylinositol-specific | 76 | 198 |
| | | | | phospholipase C, X domain | | |
| APG04010.0 | 124 | | PF03945 | delta endotoxin, N-terminal | 85 | 325 |
| | | | | domain | | |
| | | | PF00555 | delta endotoxin | 338 | 549 |
| | | | PF03944 | delta endotoxin | 560 | 702 |
| APG04010.1 | 125 | 3′ Truncation | PF03945 | delta endotoxin, N-terminal | 84 | 325 |
| | | | | domain | | |
| | | | PF00555 | delta endotoxin | 338 | 549 |
| | | | PF03944 | delta endotoxin | 560 | 701 |
| APG04037.0 | 126 | | no PFAM | | | |
| | | | domains | | | |
| APG04037.1 | 127 | Signal | no PFAM | | | |
| | | peptide | domains | | | |
| | | removed | | | | |
| APG04119.0 | 128 | | no PFAM | | | |
| | | | domains | | | |
| APG04342.0 | 129 | | PF03318 | Clostridium epsilon toxin | 121 | 233 |
| | | | | ETX/Bacillus mosquitocidal toxin | | |
| | | | | MTX2 | | |
| APG04342.1 | 130 | Signal | PF03318 | Clostridium epsilon toxin | 92 | 204 |
| | | peptide | | ETX/Bacillus mosquitocidal toxin | | |
| | | removed | | MTX2 | | |
| APG04407.0 | 131 | | PF03945 | delta endotoxin, N-terminal | 53 | 222 |
| | | | | domain | | |
| APG04409.0 | 132 | | no PFAM | | | |
| | | | domains | | | |
| APG04479.0 | 133 | | PF03318 | Clostridium epsilon toxin | 105 | 309 |
| | | | | ETX/Bacillus mosquitocidal toxin | | |
| | | | | MTX2 | | |
| APG04479.1 | 134 | Alternate | PF03318 | Clostridium epsilon toxin | 92 | 296 |
| | | start | | ETX/Bacillus mosquitocidal toxin | | |
| | | | | MTX2 | | |
| APG04479.2 | 135 | Signal | PF03318 | Clostridium epsilon toxin | 64 | 268 |
| | | peptide | | ETX/Bacillus mosquitocidal toxin | | |
| | | removed | | MTX2 | | |
| APG04531.0 | 136 | | PF03318 | Clostridium epsilon toxin | 93 | 297 |
| | | | | ETX/Bacillus mosquitocidal toxin | | |
| | | | | MTX2 | | |
| APG04531.1 | 137 | Signal | PF03318 | Clostridium epsilon toxin | 60 | 264 |
| | | peptide | | ETX/Bacillus mosquitocidal toxin | | |
| | | removed | | MTX2 | | |
| APG04536.0 | 138 | | PF14200 | Ricin-type beta-trefoil lectin | 5 | 96 |
| | | | | domain-like | | |
| | | | PF05431 | Insecticidal Crystal Toxin, P42 | 150 | 342 |
| APG04581.0 | 139 | | PF03318 | Clostridium epsilon toxin | 69 | 284 |
| | | | | ETX/Bacillus mosquitocidal toxin | | |
| | | | | MTX2 | | |
| APG04581.1 | 140 | Signal | PF03318 | Clostridium epsilon toxin | 43 | 258 |
| | | peptide | | ETX/Bacillus mosquitocidal toxin | | |
| | | removed | | MTX2 | | |
| APG04689.0 | 141 | | PF03945 | delta endotoxin, N-terminal | 74 | 262 |
| | | | | domain | | |
| | | | PF03945 | delta endotoxin, N-terminal | 286 | 329 |
| | | | | domain | | |
| | | | PF00555 | delta endotoxin | 338 | 550 |
| | | | PF03944 | delta endotoxin | 560 | 690 |
| APG04689.1 | 142 | Alternate | PF03945 | delta endotoxin, N-terminal | 74 | 262 |
| | | start | | domain | | |
| | | | PF03945 | delta endotoxin, N-terminal | 286 | 329 |
| | | | | domain | | |
| | | | PF00555 | delta endotoxin | 338 | 550 |
| | | | PF03944 | delta endotoxin | 560 | 690 |
| APG04689.2 | 143 | Alternate | PF03945 | delta endotoxin, N-terminal | 74 | 262 |
| | | start and 3′ | | domain | | |
| | | Truncation | PF03945 | delta endotoxin, N-terminal | 286 | 329 |
| | | | | domain | | |
| | | | PF00555 | delta endotoxin | 338 | 550 |
| | | | PF03944 | delta endotoxin | 560 | 690 |
| APG04690.0 | 144 | | PF03318 | Clostridium epsilon toxin | 39 | 272 |
| | | | | ETX/Bacillus mosquitocidal toxin | | |
| | | | | MTX2 | | |
| APG04693.0 | 145 | | no PFAM | | | |
| | | | domains | | | |
| APG04746.0 | 146 | | PF03318 | Clostridium epsilon toxin | 81 | 289 |
| | | | | ETX/Bacillus mosquitocidal toxin | | |
| | | | | MTX2 | | |
| APG04746.1 | 147 | Signal | PF03318 | Clostridium epsilon toxin | 48 | 256 |
| | | peptide | | ETX/Bacillus mosquitocidal toxin | | |
| | | removed | | MTX2 | | |
| APG04750.0 | 148 | | PF03318 | Clostridium epsilon toxin | 101 | 310 |
| | | | | ETX/Bacillus mosquitocidal toxin | | |
| | | | | MTX2 | | |
| APG04781.0 | 149 | | PF03318 | Clostridium epsilon toxin | 93 | 221 |
| | | | | ETX/Bacillus mosquitocidal toxin | | |
| | | | | MTX2 | | |
| APG04781.1 | 150 | Signal | PF03318 | Clostridium epsilon toxin | 62 | 190 |
| | | peptide | | ETX/Bacillus mosquitocidal toxin | | |
| | | removed | | MTX2 | | |
| APG04789.0 | 151 | | PF03318 | Clostridium epsilon toxin | 87 | 291 |
| | | | | ETX/Bacillus mosquitocidal toxin | | |
| | | | | MTX2 | | |
| APG04789.1 | 152 | Signal | PF03318 | Clostridium epsilon toxin | 56 | 259 |
| | | peptide | | ETX/Bacillus mosquitocidal toxin | | |
| | | removed | | MTX2 | | |
| APG04812.0 | 153 | | PF03318 | Clostridium epsilon toxin | 100 | 307 |
| | | | | ETX/Bacillus mosquitocidal toxin | | |
| | | | | MTX2 | | |
| APG04812.1 | 154 | Signal | PF03318 | Clostridium epsilon toxin | 81 | 288 |
| | | peptide | | ETX/Bacillus mosquitocidal toxin | | |
| | | removed | | MTX2 | | |
| APG04827.0 | 155 | | PF03945 | delta endotoxin, N-terminal | 62 | 281 |
| | | | | domain | | |
| | | | PF03944 | delta endotoxin | 484 | 621 |
| APG04832.0 | 156 | | PF14200 | Ricin-type beta-trefoil lectin | 57 | 147 |
| | | | | domain-like | | |
| | | | PF05431 | Insecticidal Crystal Toxin, P42 | 158 | 353 |
| APG04832.1 | 157 | Alternate | PF14200 | Ricin-type beta-trefoil lectin | 46 | 143 |
| | | start | | domain-like | | |
| | | | PF05431 | Insecticidal Crystal Toxin, P42 | 154 | 349 |
| APG04865.0 | 158 | | PF03318 | Clostridium epsilon toxin | 172 | 394 |
| | | | | ETX/Bacillus mosquitocidal toxin | | |
| | | | | MTX2 | | |
| APG04865.1 | 159 | Signal | PF03318 | Clostridium epsilon toxin | 149 | 371 |
| | | peptide | | ETX/Bacillus mosquitocidal toxin | | |
| | | removed | | MTX2 | | |
| APG04953.0 | 160 | | PF03945 | delta endotoxin, N-terminal | 40 | 139 |
| | | | | domain | | |
| APG05040.0 | 161 | | PF03318 | Clostridium epsilon toxin | 110 | 298 |
| | | | | ETX/Bacillus mosquitocidal toxin | | |
| | | | | MTX2 | | |
| APG05056.0 | 162 | | PF03945 | delta endotoxin, N-terminal | 90 | 316 |
| | | | | domain | | |
| | | | PF00555 | delta endotoxin | 322 | 513 |
| | | | PF03944 | delta endotoxin | 523 | 656 |
| APG05082.0 | 163 | | PF03945 | delta endotoxin, N-terminal | 64 | 294 |
| | | | | domain | | |
| | | | PF00555 | delta endotoxin | 301 | 498 |
| | | | PF03944 | delta endotoxin | 508 | 648 |
| APG05139.0 | 164 | | PF03945 | delta endotoxin, N-terminal | 120 | 295 |
| | | | | domain | | |
| | | | PF01473 | Putative cell wall binding repeat | 438 | 450 |
| APG05139.1 | 165 | Signal | PF03945 | delta endotoxin, N-terminal | 82 | 257 |
| | | peptide | | domain | | |
| | | removed | PF01473 | Putative cell wall binding repeat | 400 | 412 |
| APG05228.0 | 166 | | no PFAM | | | |
| | | | domains | | | |
| APG05252.0 | 167 | | PF03318 | Clostridium epsilon toxin | 23 | 148 |
| | | | | ETX/Bacillus mosquitocidal toxin | | |
| | | | | MTX2 | | |
| APG05255.0 | 168 | | PF05431 | Insecticidal Crystal Toxin, P42 | 203 | 391 |
| APG05255.1 | 169 | Signal | PF05431 | Insecticidal Crystal Toxin, P42 | 174 | 362 |
| | | peptide | | | | |
| | | removed | | | | |
| APG05307.0 | 170 | | no PFAM | | | |
| | | | domains | | | |
| APG05307.1 | 171 | Signal | no PFAM | | | |
| | | peptide | domains | | | |
| | | removed | | | | |
| APG05338.0 | 172 | | no PFAM | | | |
| | | | domains | | | |
| APG05338.1 | 173 | Alternate | no PFAM | | | |
| | | start | domains | | | |
| APG05358.0 | 174 | | PF03318 | Clostridium epsilon toxin | 38 | 265 |
| | | | | ETX/Bacillus mosquitocidal toxin | | |
| | | | | MTX2 | | |
| APG05385.0 | 175 | | no PFAM | | | |
| | | | domains | | | |
| APG05385.1 | 176 | Alternate | no PFAM | | | |
| | | start | domains | | | |
| APG05385.2 | 177 | Signal | no PFAM | | | |
| | | peptide | domains | | | |
| | | removed | | | | |
| APG05424.0 | 178 | | PF03945 | delta endotoxin, N-terminal | 72 | 298 |
| | | | | domain | | |
| | | | PF00030 | Beta/Gamma crystallin | 651 | 727 |
| | | | PF14200 | Ricin-type beta-trefoil lectin | 851 | 938 |
| | | | | domain-like | | |
| APG05424.1 | 179 | Alternate | PF03945 | delta endotoxin, N-terminal | 69 | 295 |
| | | start | | domain | | |
| | | | PF00030 | Beta/Gamma crystallin | 648 | 724 |
| | | | PF14200 | Ricin-type beta-trefoil lectin | 848 | 935 |
| | | | | domain-like | | |
| APG05439.0 | 180 | | PF03945 | delta endotoxin, N-terminal | 141 | 322 |
| | | | | domain | | |
| APG05439.1 | 181 | Alternate | PF03945 | delta endotoxin, N-terminal | 124 | 305 |
| | | start | | domain | | |
| APG05445.0 | 182 | | no PFAM | | | |
| | | | domains | | | |
| APG05468.0 | 183 | | PF03318 | Clostridium epsilon toxin | 90 | 290 |
| | | | | ETX/Bacillus mosquitocidal toxin | | |
| | | | | MTX2 | | |
| APG05468.1 | 184 | Signal | PF03318 | Clostridium epsilon toxin | 64 | 264 |
| | | peptide | | ETX/Bacillus mosquitocidal toxin | | |
| | | removed | | MTX2 | | |
| APG05519.0 | 185 | | PF03945 | delta endotoxin, N-terminal | 69 | 279 |
| | | | | domain | | |
| | | | PF03944 | delta endotoxin | 469 | 614 |
| APG05519.1 | 186 | 3′ Truncation | PF03945 | delta endotoxin, N-terminal | 69 | 279 |
| | | | | domain | | |
| | | | PF03944 | delta endotoxin | 469 | 614 |
| APG05563.0 | 187 | | PF08310 | LGFP repeat | 255 | 303 |
| | | | PF08310 | LGFP repeat | 308 | 367 |
| | | | PF08310 | LGFP repeat | 369 | 401 |
| APG05563.1 | 188 | Alternate | PF08310 | LGFP repeat | 255 | 303 |
| | | start | PF08310 | LGFP repeat | 308 | 367 |
| | | | PF08310 | LGFP repeat | 369 | 401 |
| APG05590.0 | 189 | | PF03945 | delta endotoxin, N-terminal | 50 | 259 |
| | | | | domain | | |
| | | | PF03944 | delta endotoxin | 520 | 654 |
| APG05632.0 | 190 | | PF07523 | Bacterial Ig-like domain (group | 295 | 346 |
| | | | | 3) | | |
| APG05632.1 | 191 | Alternate | PF07523 | Bacterial Ig-like domain (group | 289 | 340 |
| | | start | | 3) | | |
| APG05632.2 | 192 | Signal | PF07523 | Bacterial Ig-like domain (group | 261 | 312 |
| | | peptide | | 3) | | |
| | | removed | | | | |
| APG05724.0 | 193 | | no PFAM | | | |
| | | | domains | | | |
| APG05766.0 | 194 | | no PFAM | | | |
| | | | domains | | | |
| APG05766.1 | 195 | Signal | no PFAM | | | |
| | | peptide | domains | | | |
| | | removed | | | | |
| APG05777.0 | 196 | | no PFAM | | | |
| | | | domains | | | |
| APG05777.1 | 197 | Signal | no PFAM | | | |
| | | peptide | domains | | | |
| | | removed | | | | |
| APG05787.0 | 198 | | PF03318 | Clostridium epsilon toxin | 90 | 237 |
| | | | | ETX/Bacillus mosquitocidal toxin | | |
| | | | | MTX2 | | |
| APG05787.1 | 199 | Signal | PF03318 | Clostridium epsilon toxin | 65 | 212 |
| | | peptide | | ETX/Bacillus mosquitocidal toxin | | |
| | | removed | | MTX2 | | |
| APG05848.0 | 200 | | PF03945 | delta endotoxin, N-terminal | 97 | 286 |
| | | | | domain | | |
| APG05918.0 | 201 | | PF03318 | Clostridium epsilon toxin | 40 | 268 |
| | | | | ETX/Bacillus mosquitocidal toxin | | |
| | | | | MTX2 | | |
| APG06048.0 | 202 | | no PFAM | | | |
| | | | domains | | | |
| APG06048.1 | 203 | Alternate | no PFAM | | | |
| | | start | domains | | | |
| APG06056.0 | 204 | | PF03945 | delta endotoxin, N-terminal | 68 | 275 |
| | | | | domain | | |
| | | | PF03945 | delta endotoxin, N-terminal | 320 | 352 |
| | | | | domain | | |
| | | | PF00555 | delta endotoxin | 357 | 451 |
| | | | PF03944 | delta endotoxin | 573 | 712 |
| | | | PF14200 | Ricin-type beta-trefoil lectin | 755 | 855 |
| | | | | domain-like | | |
| APG06056.1 | 205 | 3′ Truncation | PF03945 | delta endotoxin, N-terminal | 68 | 275 |
| | | | | domain | | |
| | | | PF03945 | delta endotoxin, N-terminal | 320 | 352 |
| | | | | domain | | |
| | | | PF00555 | delta endotoxin | 357 | 452 |
| | | | PF03944 | delta endotoxin | 573 | 712 |
| APG06121.0 | 206 | | PF01338 | Bacillus thuringiensis toxin | 4 | 188 |
| APG06121.1 | 207 | Alternate | PF01338 | Bacillus thuringiensis toxin | 3 | 188 |
| | | start | | | | |
| APG06141.0 | 208 | | no PFAM | | | |
| | | | domains | | | |
| APG06156.0 | 209 | | PF03945 | delta endotoxin, N-terminal | 67 | 285 |
| | | | | domain | | |
| | | | PF00555 | delta endotoxin | 291 | 483 |
| | | | PF03944 | delta endotoxin | 494 | 629 |
| APG06156.1 | 210 | Alternate | PF03945 | delta endotoxin, N-terminal | 56 | 274 |
| | | start and 3′ | | domain | | |
| | | Truncation | PF00555 | delta endotoxin | 280 | 472 |
| | | | PF03944 | delta endotoxin | 483 | 618 |
| APG06236.0 | 211 | | no PFAM | | | |
| | | | domains | | | |
| APG06236.1 | 212 | Alternate | no PFAM | | | |
| | | start | domains | | | |
| APG06287.0 | 213 | | PF03945 | delta endotoxin, N-terminal | 71 | 300 |
| | | | | domain | | |
| | | | PF00555 | delta endotoxin | 323 | 508 |
| | | | PF03944 | delta endotoxin | 519 | 660 |
| APG06452.0 | 214 | | PF03318 | Clostridium epsilon toxin | 517 | 717 |
| | | | | ETX/Bacillus mosquitocidal toxin | | |
| | | | | MTX2 | | |
| APG06452.1 | 215 | Alternate | PF03318 | Clostridium epsilon toxin | 107 | 307 |
| | | start | | ETX/Bacillus mosquitocidal toxin | | |
| | | | | MTX2 | | |
| APG06452.2 | 216 | Alternate | PF03318 | Clostridium epsilon toxin | 52 | 252 |
| | | start | | ETX/Bacillus mosquitocidal toxin | | |
| | | | | MTX2 | | |
| APG06456.0 | 217 | | PF03945 | delta endotoxin, N-terminal | 61 | 294 |
| | | | | domain | | |
| | | | PF00555 | delta endotoxin | 301 | 516 |
| | | | PF03944 | delta endotoxin | 526 | 661 |
| APG06456.1 | 218 | Alternate | PF03945 | delta endotoxin, N-terminal | 59 | 292 |
| | | start and 3′ | | domain | | |
| | | Truncation | PF00555 | delta endotoxin | 299 | 514 |
| | | | PF03944 | delta endotoxin | 524 | 659 |
| APG06596.0 | 219 | | PF03318 | Clostridium epsilon toxin | 109 | 319 |
| | | | | ETX/Bacillus mosquitocidal toxin | | |
| | | | | MTX2 | | |
| APG06596.1 | 220 | Signal | PF03318 | Clostridium epsilon toxin | 75 | 285 |
| | | peptide | | ETX/Bacillus mosquitocidal toxin | | |
| | | removed | | MTX2 | | |
| APG06633.0 | 221 | | no PFAM | | | |
| | | | domains | | | |
| APG06635.0 | 222 | | PF03318 | Clostridium epsilon toxin | 50 | 168 |
| | | | | ETX/Bacillus mosquitocidal toxin | | |
| | | | | MTX2 | | |
| APG06635.1 | 223 | Alternate | PF03318 | Clostridium epsilon toxin | 50 | 168 |
| | | start | | ETX/Bacillus mosquitocidal toxin | | |
| | | | | MTX2 | | |
| APG06681.0 | 224 | | PF03945 | delta endotoxin, N-terminal | 75 | 343 |
| | | | | domain | | |
| | | | PF03944 | delta endotoxin | 604 | 738 |
| APG06681.1 | 225 | Alternate | PF03945 | delta endotoxin, N-terminal | 72 | 340 |
| | | start | | domain | | |
| | | | PF03944 | delta endotoxin | 601 | 735 |
| APG06681.2 | 226 | Alternate | PF03945 | delta endotoxin, N-terminal | 72 | 340 |
| | | start and 3′ | | domain | | |
| | | Truncation | PF03944 | delta endotoxin | 601 | 735 |
| APG06729.0 | 227 | | PF03318 | Clostridium epsilon toxin | 101 | 333 |
| | | | | ETX/Bacillus mosquitocidal toxin | | |
| | | | | MTX2 | | |
| APG06729.1 | 228 | Signal | PF03318 | Clostridium epsilon toxin | 72 | 304 |
| | | peptide | | ETX/Bacillus mosquitocidal toxin | | |
| | | removed | | MTX2 | | |
| APG06744.0 | 229 | | PF03318 | Clostridium epsilon toxin | 82 | 300 |
| | | | | ETX/Bacillus mosquitocidal toxin | | |
| | | | | MTX2 | | |
| APG06744.1 | 230 | Alternate | PF03318 | Clostridium epsilon toxin | 65 | 283 |
| | | start | | ETX/Bacillus mosquitocidal toxin | | |
| | | | | MTX2 | | |
| APG06744.2 | 231 | Signal | PF03318 | Clostridium epsilon toxin | 39 | 257 |
| | | peptide | | ETX/Bacillus mosquitocidal toxin | | |
| | | removed | | MTX2 | | |
| APG06751.0 | 232 | | PF03945 | delta endotoxin, N-terminal | 117 | 272 |
| | | | | domain | | |
| APG06751.1 | 233 | Alternate | PF03945 | delta endotoxin, N-terminal | 108 | 263 |
| | | start | | domain | | |
| APG06751.2 | 234 | Signal | PF03945 | delta endotoxin, N-terminal | 65 | 220 |
| | | peptide | | domain | | |
| | | removed | | | | |
| APG06820.0 | 235 | | PF03318 | Clostridium epsilon toxin | 139 | 276 |
| | | | | ETX/Bacillus mosquitocidal toxin | | |
| | | | | MTX2 | | |
| APG06820.1 | 236 | Alternate | PF03318 | Clostridium epsilon toxin | 135 | 272 |
| | | start | | ETX/Bacillus mosquitocidal toxin | | |
| | | | | MTX2 | | |
| APG06820.2 | 237 | Signal | PF03318 | Clostridium epsilon toxin | 106 | 243 |
| | | peptide | | ETX/Bacillus mosquitocidal toxin | | |
| | | removed | | MTX2 | | |
| APG06920.0 | 238 | | PF00652 | Ricin-type beta-trefoil lectin | 36 | 166 |
| | | | | domain | | |
| | | | PF05431 | Insecticidal Crystal Toxin, P42 | 178 | 355 |
| APG06936.0 | 239 | | no PFAM | | | |
| | | | domains | | | |
| APG06936.1 | 240 | Alternate | no PFAM | | | |
| | | start | domains | | | |
| APG07032.0 | 241 | | PF07691 | PA14 domain | 53 | 179 |
| | | | PF03495 | Clostridial binary toxin | 225 | 631 |
| | | | | B/anthrax toxin PA | | |
| APG07032.1 | 242 | Signal | PF07691 | PA14 domain | 26 | 152 |
| | | peptide | PF03495 | Clostridial binary toxin | 198 | 604 |
| | | removed | | B/anthrax toxin PA | | |
| APG07034.0 | 243 | | PF03318 | Clostridium epsilon toxin | 141 | 345 |
| | | | | ETX/Bacillus mosquitocidal toxin | | |
| | | | | MTX2 | | |
| APG07034.1 | 244 | Signal | PF03318 | Clostridium epsilon toxin | 106 | 310 |
| | | peptide | | ETX/Bacillus mosquitocidal toxin | | |
| | | removed | | MTX2 | | |
| APG07047.0 | 245 | | PF03945 | delta endotoxin, N-terminal | 76 | 336 |
| | | | | domain | | |
| | | | PF00555 | delta endotoxin | 346 | 480 |
| | | | PF03944 | delta endotoxin | 546 | 683 |
| APG07047.1 | 246 | Alternate | PF03945 | delta endotoxin, N-terminal | 59 | 319 |
| | | start and 3′ | | domain | | |
| | | Truncation | PF00555 | delta endotoxin | 329 | 464 |
| | | | PF03944 | delta endotoxin | 529 | 666 |
| APG07178.0 | 247 | | PF05431 | Insecticidal Crystal Toxin, P42 | 25 | 215 |
| APG07178.1 | 248 | Alternate | PF05431 | Insecticidal Crystal Toxin, P42 | 25 | 215 |
| | | start | | | | |
| APG07202.0 | 249 | | PF14200 | Ricin-type beta-trefoil lectin | 48 | 144 |
| | | | | domain-like | | |
| | | | PF05431 | Insecticidal Crystal Toxin, P42 | 152 | 351 |
| APG07202.1 | 250 | Alternate | PF14200 | Ricin-type beta-trefoil lectin | 48 | 144 |
| | | start | | domain-like | | |
| | | | PF05431 | Insecticidal Crystal Toxin, P42 | 152 | 351 |
| APG07340.0 | 251 | | PF06101 | Plant protein of unknown | 4 | 170 |
| | | | | function (DUF946) | | |
| APG07340.1 | 252 | Alternate | PF06101 | Plant protein of unknown | 4 | 160 |
| | | start | | function (DUF946) | | |
| APG07340.2 | 253 | Alternate | PF06101 | Plant protein of unknown | 4 | 170 |
| | | start | | function (DUF946) | | |
| APG07562.0 | 254 | | PF05431 | Insecticidal Crystal Toxin, P42 | 90 | 210 |
| APG07643.0 | 255 | | PF06355 | Aegerolysin | 53 | 118 |
| APG07643.1 | 256 | Alternate | PF06355 | Aegerolysin | 49 | 114 |
| | | start | | | | |
| APG07654.0 | 257 | | PF03945 | delta endotoxin, N-terminal | 93 | 310 |
| | | | | domain | | |
| | | | PF03944 | delta endotoxin | 498 | 643 |
| APG07654.1 | 258 | 3′ Truncation | PF03945 | delta endotoxin, N-terminal | 93 | 310 |
| | | | | domain | | |
| | | | PF03944 | delta endotoxin | 498 | 643 |
| APG07707.0 | 259 | | PF03945 | delta endotoxin, N-terminal | 139 | 330 |
| | | | | domain | | |
| APG07707.1 | 260 | Alternate | PF03945 | delta endotoxin, N-terminal | 123 | 314 |
| | | start | | domain | | |
| APG07707.2 | 261 | Signal | PF03945 | delta endotoxin, N-terminal | 87 | 278 |
| | | peptide | | domain | | |
| | | removed | | | | |
| APG07751.0 | 262 | | PF03945 | delta endotoxin, N-terminal | 77 | 319 |
| | | | | domain | | |
| | | | PF00555 | delta endotoxin | 328 | 540 |
| | | | PF03944 | delta endotoxin | 550 | 682 |
| APG07751.1 | 263 | Alternate | PF03945 | delta endotoxin, N-terminal | 65 | 307 |
| | | start | | domain | | |
| | | | PF00555 | delta endotoxin | 316 | 528 |
| | | | PF03944 | delta endotoxin | 538 | 670 |
| APG07930.0 | 264 | | PF14200 | Ricin-type beta-trefoil lectin | 70 | 156 |
| | | | | domain-like | | |
| | | | PF05431 | Insecticidal Crystal Toxin, P42 | 166 | 357 |
| APG07944.0 | 265 | | PF03318 | Clostridium epsilon toxin | 143 | 225 |
| | | | | ETX/Bacillus mosquitocidal toxin | | |
| | | | | MTX2 | | |
| APG07944.1 | 266 | Signal | PF03318 | Clostridium epsilon toxin | 125 | 207 |
| | | peptide | | ETX/Bacillus mosquitocidal toxin | | |
| | | removed | | MTX2 | | |
| APG08056.0 | 267 | | PF06355 | Aegerolysin | 88 | 155 |
| APG08056.1 | 268 | Alternate | PF06355 | Aegerolysin | 55 | 122 |
| | | start | | | | |
| APG08101.0 | 269 | | PF05431 | Insecticidal Crystal Toxin, P42 | 272 | 466 |
| APG08101.1 | 270 | Alternate | PF05431 | Insecticidal Crystal Toxin, P42 | 272 | 466 |
| | | start | | | | |
| APG08265.0 | 271 | | PF03945 | delta endotoxin, N-terminal | 36 | 257 |
| | | | | domain | | |
| | | | PF00555 | delta endotoxin | 263 | 478 |
| | | | PF03944 | delta endotoxin | 488 | 646 |
| APG08298.0 | 272 | | PF03318 | Clostridium epsilon toxin | 33 | 270 |
| | | | | ETX/Bacillus mosquitocidal toxin | | |
| | | | | MTX2 | | |
| APG08298.1 | 273 | Alternate | PF03318 | Clostridium epsilon toxin | 33 | 270 |
| | | start | | ETX/Bacillus mosquitocidal toxin | | |
| | | | | MTX2 | | |
| APG08348.0 | 274 | | PF14200 | Ricin-type beta-trefoil lectin | 42 | 140 |
| | | | | domain-like | | |
| | | | PF05431 | Insecticidal Crystal Toxin, P42 | 155 | 348 |
| APG08348.1 | 275 | Alternate | PF14200 | Ricin-type beta-trefoil lectin | 42 | 140 |
| | | start | | domain-like | | |
| | | | PF05431 | Insecticidal Crystal Toxin, P42 | 155 | 348 |
| APG08366.0 | 276 | | PF05791 | Bacillus haemolytic enterotoxin | 69 | 199 |
| | | | | (HBL) | | |
| APG08414.0 | 277 | | PF07691 | PA14 domain | 64 | 189 |
| | | | PF03495 | Clostridial binary toxin | 229 | 644 |
| | | | | B/anthrax toxin PA | | |
| APG08414.1 | 278 | Alternate | PF07691 | PA14 domain | 45 | 170 |
| | | start | PF03495 | Clostridial binary toxin | 210 | 625 |
| | | | | B/anthrax toxin PA | | |
| APG08601.0 | 279 | | PF03945 | delta endotoxin, N-terminal | 218 | 383 |
| | | | | domain | | |
| APG08601.1 | 280 | Alternate | PF03945 | delta endotoxin, N-terminal | 122 | 287 |
| | | start | | domain | | |
| APG08601.2 | 281 | Signal | PF03945 | delta endotoxin, N-terminal | 84 | 249 |
| | | peptide | | domain | | |
| | | removed | | | | |
| APG08605.0 | 282 | | PF03318 | Clostridium epsilon toxin | 98 | 236 |
| | | | | ETX/Bacillus mosquitocidal toxin | | |
| | | | | MTX2 | | |
| APG08605.1 | 283 | Signal | PF03318 | Clostridium epsilon toxin | 68 | 206 |
| | | peptide | | ETX/Bacillus mosquitocidal toxin | | |
| | | removed | | MTX2 | | |
| APG08681.0 | 284 | | PF03945 | delta endotoxin, N-terminal | 111 | 279 |
| | | | | domain | | |
| | | | PF01473 | Putative cell wall binding repeat | 438 | 455 |
| | | | PF14200 | Ricin-type beta-trefoil lectin | 493 | 594 |
| | | | | domain-like | | |
| APG08882.0 | 285 | | PF03318 | Clostridium epsilon toxin | 175 | 303 |
| | | | | ETX/Bacillus mosquitocidal toxin | | |
| | | | | MTX2 | | |
| APG08882.1 | 286 | Signal | PF03318 | Clostridium epsilon toxin | 133 | 259 |
| | | peptide | | ETX/Bacillus mosquitocidal toxin | | |
| | | removed | | MTX2 | | |
| APG08884.0 | 287 | | PF03945 | delta endotoxin, N-terminal | 74 | 328 |
| | | | | domain | | |
| | | | PF00555 | delta endotoxin | 334 | 530 |
| | | | PF03944 | delta endotoxin | 540 | 676 |
| APG08884.1 | 288 | 3′ Truncation | PF03945 | delta endotoxin, N-terminal | 74 | 328 |
| | | | | domain | | |
| | | | PF00555 | delta endotoxin | 334 | 530 |
| | | | PF03944 | delta endotoxin | 540 | 675 |
| APG08884 | 289 | | PF07029 | CryBP1 protein | 34 | 184 |
| CryBP1 | | | | | | |
| (APG05788.0) | | | | | | |
| APG08917.0 | 290 | | no PFAM | | | |
| | | | domains | | | |
| APG08925.0 | 291 | | PF03318 | Clostridium epsilon toxin | 66 | 269 |
| | | | | ETX/Bacillus mosquitocidal toxin | | |
| | | | | MTX2 | | |
| APG08925.1 | 292 | Signal | PF03318 | Clostridium epsilon toxin | 39 | 242 |
| | | peptide | | ETX/Bacillus mosquitocidal toxin | | |
| | | removed | | MTX2 | | |
| APG09069.0 | 293 | | PF00652 | Ricin-type beta-trefoil lectin | 43 | 163 |
| | | | | domain | | |
| | | | PF05431 | Insecticidal Crystal Toxin, P42 | 175 | 352 |
| APG09110.0 | 294 | | PF03318 | Clostridium epsilon toxin | 133 | 335 |
| | | | | ETX/Bacillus mosquitocidal toxin | | |
| | | | | MTX2 | | |
| APG09110.1 | 295 | Alternate | PF03318 | Clostridium epsilon toxin | 118 | 320 |
| | | start | | ETX/Bacillus mosquitocidal toxin | | |
| | | | | MTX2 | | |
| APG09110.2 | 296 | Signal | PF03318 | Clostridium epsilon toxin | 85 | 287 |
| | | peptide | | ETX/Bacillus mosquitocidal toxin | | |
| | | removed | | MTX2 | | |
| APG09112.0 | 297 | | PF03945 | delta endotoxin, N-terminal | 93 | 262 |
| | | | | domain | | |
| | | | PF14200 | Ricin-type beta-trefoil lectin | 548 | 647 |
| | | | | domain-like | | |
| APG09112.1 | 298 | Alternate | PF03945 | delta endotoxin, N-terminal | 37 | 206 |
| | | start | | domain | | |
| | | | PF14200 | Ricin-type beta-trefoil lectin | 492 | 591 |
| | | | | domain-like | | |
| APG09112.2 | 299 | Alternate | PF03945 | delta endotoxin, N-terminal | 37 | 207 |
| | | start and 3′ | | domain | | |
| | | Truncation | | | | |
| APG09146.0 | 300 | | PF05431 | Insecticidal Crystal Toxin, P42 | 263 | 441 |
| APG09146.1 | 301 | Alternate | PF05431 | Insecticidal Crystal Toxin, P42 | 243 | 421 |
| | | start | | | | |
| APG09153.0 | 302 | | PF05431 | Insecticidal Crystal Toxin, P42 | 187 | 378 |
| APG09293.0 | 303 | | PF07691 | PA14 domain | 16 | 140 |
| | | | PF03495 | Clostridial binary toxin | 186 | 596 |
| | | | | B/anthrax toxin PA | | |
| | | | PF09259 | Fungal immunomodulatory | 837 | 923 |
| | | | | protein Fve | | |
| APG09427.0 | 304 | | PF03318 | Clostridium epsilon toxin | 100 | 315 |
| | | | | ETX/Bacillus mosquitocidal toxin | | |
| | | | | MTX2 | | |
| APG09427.1 | 305 | Signal | PF03318 | Clostridium epsilon toxin | 56 | 271 |
| | | peptide | | ETX/Bacillus mosquitocidal toxin | | |
| | | removed | | MTX2 | | |
| APG09469.0 | 306 | | PF03318 | Clostridium epsilon toxin | 126 | 352 |
| | | | | ETX/Bacillus mosquitocidal toxin | | |
| | | | | MTX2 | | |
| APG09469.1 | 307 | Alternate | PF03318 | Clostridium epsilon toxin | 115 | 341 |
| | | start | | ETX/Bacillus mosquitocidal toxin | | |
| | | | | MTX2 | | |
| APG09469.2 | 308 | Signal | PF03318 | Clostridium epsilon toxin | 84 | 310 |
| | | peptide | | ETX/Bacillus mosquitocidal toxin | | |
| | | removed | | MTX2 | | |
| APG09512.0 | 309 | | PF03945 | delta endotoxin, N-terminal | 76 | 240 |
| | | | | domain | | |
| | | | PF01473 | Putative cell wall binding repeat | 341 | 358 |
| | | | PF01473 | Putative cell wall binding repeat | 361 | 379 |
| APG09572.0 | 310 | | no PFAM | | | |
| | | | domains | | | |
| APG09572.1 | 311 | Signal | no PFAM | | | |
| | | peptide | domains | | | |
| | | removed | | | | |
| APG09602.0 | 312 | | no PFAM | | | |
| | | | domains | | | |
| APG09602.1 | 313 | Signal | no PFAM | | | |
| | | peptide | domains | | | |
| | | removed | | | | |
| APG09620.0 | 314 | | PF03318 | Clostridium epsilon toxin | 29 | 232 |
| | | | | ETX/Bacillus mosquitocidal toxin | | |
| | | | | MTX2 | | |
| APG09668.0 | 315 | | PF03945 | delta endotoxin, N-terminal | 57 | 296 |
| | | | | domain | | |
| | | | PF14200 | Ricin-type beta-trefoil lectin | 649 | 739 |
| | | | | domain-like | | |
| | | | PF00652 | Ricin-type beta-trefoil lectin | 779 | 899 |
| | | | | domain | | |
| APG09719.0 | 316 | | PF03318 | Clostridium epsilon toxin | 137 | 343 |
| | | | | ETX/Bacillus mosquitocidal toxin | | |
| | | | | MTX2 | | |
| APG09719.1 | 317 | Alternate | PF03318 | Clostridium epsilon toxin | 134 | 340 |
| | | start | | ETX/Bacillus mosquitocidal toxin | | |
| | | | | MTX2 | | |
| APG09719.2 | 318 | Signal | PF03318 | Clostridium epsilon toxin | 109 | 315 |
| | | peptide | | ETX/Bacillus mosquitocidal toxin | | |
| | | removed | | MTX2 | | |
| APG09750.0 | 319 | | no PFAM | | | |
| | | | domains | | | |
| APG09770.0 | 320 | | no PFAM | | | |
| | | | domains | | | |
| APG09770.1 | 321 | Alternate | no PFAM | | | |
| | | start | domains | | | |
| APG09770.2 | 322 | Signal | no PFAM | | | |
| | | peptide | domains | | | |
| | | removed | | | | |
| APG09794.0 | 323 | | PF03945 | delta endotoxin, N-terminal | 138 | 353 |
| | | | | domain | | |
| | | | PF03944 | delta endotoxin | 531 | 666 |
| | | | PF01473 | Putative cell wall binding repeat | 721 | 737 |
| | | | PF01473 | Putative cell wall binding repeat | 750 | 766 |
| | | | PF01473 | Putative cell wall binding repeat | 779 | 795 |
| | | | PF01473 | Putative cell wall binding repeat | 896 | 911 |
| APG09794.1 | 324 | Signal | PF03945 | delta endotoxin, N-terminal | 108 | 323 |
| | | peptide | | domain | | |
| | | removed | PF03944 | delta endotoxin | 501 | 636 |
| | | | PF01473 | Putative cell wall binding repeat | 691 | 707 |
| | | | PF01473 | Putative cell wall binding repeat | 720 | 736 |
| | | | PF01473 | Putative cell wall binding repeat | 749 | 765 |
| | | | PF01473 | Putative cell wall binding repeat | 866 | 881 |
| APG09794.2 | 325 | Signal | PF03945 | delta endotoxin, N-terminal | 108 | 323 |
| | | peptide | | domain | | |
| | | removed and | PF03944 | delta endotoxin | 501 | 636 |
| | | 3′ Truncation | | | | |
| APG09805.0 | 326 | | PF03945 | delta endotoxin, N-terminal | 64 | 308 |
| | | | | domain | | |
| | | | PF00555 | delta endotoxin | 314 | 531 |
| | | | PF03944 | delta endotoxin | 541 | 682 |
| APG09805.1 | 327 | 3′ Truncation | PF03945 | delta endotoxin, N-terminal | 64 | 308 |
| | | | | domain | | |
| | | | PF00555 | delta endotoxin | 314 | 531 |
| | | | PF03944 | delta endotoxin | 541 | 682 |
| APG09876.0 | 328 | | PF03318 | Clostridium epsilon toxin | 45 | 278 |
| | | | | ETX/Bacillus mosquitocidal toxin | | |
| | | | | MTX2 | | |
| APG09904.0 | 329 | | PF03318 | Clostridium epsilon toxin | 68 | 253 |
| | | | | ETX/Bacillus mosquitocidal toxin | | |
| | | | | MTX2 | | |
| APG09957.0 | 330 | | no PFAM | | | |
| | | | domains | | | |
| APG09957.1 | 331 | Alternate | no PFAM | | | |
| | | start | domains | | | |
| APG01045.0 | 332 | | PF03945 | delta endotoxin, N-terminal | 90 | 314 |
| | | | | domain | | |
| | | | PF00555 | delta endotoxin | 322 | 513 |
| | | | PF03944 | delta endotoxin | 523 | 656 |
| APG01045.1 | 333 | 3′ Truncation | PF03945 | delta endotoxin, N-terminal | 90 | 314 |
| | | | | domain | | |
| | | | PF00555 | delta endotoxin | 322 | 513 |
| | | | PF03944 | delta endotoxin | 523 | 656 |
| APG02717.0 | 334 | | PF03945 | delta endotoxin, N-terminal | 83 | 266 |
| | | | | domain | | |
| | | | PF00555 | delta endotoxin | 325 | 529 |
| | | | PF03944 | delta endotoxin | 539 | 678 |
| APG03377.0 | 335 | | PF03318 | Clostridium epsilon toxin | 89 | 304 |
| | | | | ETX/Bacillus mosquitocidal toxin | | |
| | | | | MTX2 | | |
| APG03377.1 | 336 | Signal | PF03318 | Clostridium epsilon toxin | 56 | 271 |
| | | peptide | | ETX/Bacillus mosquitocidal toxin | | |
| | | removed | | MTX2 | | |
| APG03553.0 | 337 | | PF03318 | Clostridium epsilon toxin | 226 | 355 |
| | | | | ETX/Bacillus mosquitocidal toxin | | |
| | | | | MTX2 | | |
| APG03553.1 | 338 | Signal | PF03318 | Clostridium epsilon toxin | 199 | 327 |
| | | peptide | | ETX/Bacillus mosquitocidal toxin | | |
| | | removed | | MTX2 | | |
| APG04492.0 | 339 | | PF03945 | delta endotoxin, N-terminal | 69 | 241 |
| | | | | domain | | |
| | | | PF01473 | Putative cell wall binding repeat | 341 | 358 |
| | | | PF01473 | Putative cell wall binding repeat | 361 | 379 |
| APG04702.0 | 340 | | PF03318 | Clostridium epsilon toxin | 90 | 290 |
| | | | | ETX/Bacillus mosquitocidal toxin | | |
| | | | | MTX2 | | |
| APG04702.1 | 341 | Signal | PF03318 | Clostridium epsilon toxin | 64 | 264 |
| | | peptide | | ETX/Bacillus mosquitocidal toxin | | |
| | | removed | | MTX2 | | |
| APG04990.0 | 342 | | PF03318 | Clostridium epsilon toxin | 100 | 306 |
| | | | | ETX/Bacillus mosquitocidal toxin | | |
| | | | | MTX2 | | |
| APG05105.0 | 343 | | PF03945 | delta endotoxin, N-terminal | 113 | 343 |
| | | | | domain | | |
| | | | PF03944 | delta endotoxin | 539 | 675 |
| APG05105.1 | 344 | Alternate | PF03945 | delta endotoxin, N-terminal | 107 | 337 |
| | | start | | domain | | |
| | | | PF03944 | delta endotoxin | 533 | 669 |
| APG05105.2 | 345 | Signal | PF03945 | delta endotoxin, N-terminal | 77 | 307 |
| | | peptide | | domain | | |
| | | removed | | | | |
| | | | PF03944 | delta endotoxin | 503 | 639 |
| APG05105.3 | 346 | Alternate | PF03945 | delta endotoxin, N-terminal | 107 | 337 |
| | | start and 3′ | | domain | | |
| | | Truncation | | | | |
| | | | PF03944 | delta endotoxin | 533 | 669 |
| APG05105.4 | 347 | Signal | PF03945 | delta endotoxin, N-terminal | 77 | 307 |
| | | peptide | | domain | | |
| | | removed and | | | | |
| | | 3′ Truncation | | | | |
| | | | PF03944 | delta endotoxin | 503 | 639 |
| APG05140.0 | 348 | | PF03318 | Clostridium epsilon toxin | 116 | 306 |
| | | | | ETX/Bacillus mosquitocidal toxin | | |
| | | | | MTX2 | | |
| APG05140.1 | 349 | Alternate | PF03318 | Clostridium epsilon toxin | 113 | 303 |
| | | start | | ETX/Bacillus mosquitocidal toxin | | |
| | | | | MTX2 | | |
| APG05183.0 | 350 | | PF03318 | Clostridium epsilon toxin | 80 | 289 |
| | | | | ETX/Bacillus mosquitocidal toxin | | |
| | | | | MTX2 | | |
| APG05183.1 | 351 | Signal | PF03318 | Clostridium epsilon toxin | 54 | 263 |
| | | peptide | | ETX/Bacillus mosquitocidal toxin | | |
| | | removed | | MTX2 | | |
| APG05475.0 | 352 | | PF14200 | Ricin-type beta-trefoil lectin | 5 | 83 |
| | | | | domain-like | | |
| | | | PF14200 | Ricin-type beta-trefoil lectin | 91 | 152 |
| | | | | domain-like | | |
| | | | PF05431 | Insecticidal Crystal Toxin, P42 | 181 | 340 |
| APG05689.0 | 353 | | PF03945 | delta endotoxin, N-terminal | 139 | 321 |
| | | | | domain | | |
| APG05689.1 | 354 | Alternate | PF03945 | delta endotoxin, N-terminal | 122 | 304 |
| | | start | | domain | | |
| APG05689.2 | 355 | Signal | PF03945 | delta endotoxin, N-terminal | 84 | 266 |
| | | peptide | | domain | | |
| | | removed | | | | |
| APG07291.0 | 356 | | PF03945 | delta endotoxin, N-terminal | 119 | 292 |
| | | | | domain | | |
| APG07291.1 | 357 | Signal | PF03945 | delta endotoxin, N-terminal | 81 | 254 |
| | | peptide | | domain | | |
| | | removed | | | | |
| APG07381.0 | 358 | | PF03318 | Clostridium epsilon toxin | 85 | 291 |
| | | | | ETX/Bacillus mosquitocidal toxin | | |
| | | | | MTX2 | | |
| APG07381.1 | 359 | Signal | PF03318 | Clostridium epsilon toxin | 52 | 258 |
| | | peptide | | ETX/Bacillus mosquitocidal toxin | | |
| | | removed | | MTX2 | | |
| APG07452.0 | 360 | | PF03318 | Clostridium epsilon toxin | 127 | 352 |
| | | | | ETX/Bacillus mosquitocidal toxin | | |
| | | | | MTX2 | | |
| APG07452.1 | 361 | Alternate | PF03318 | Clostridium epsilon toxin | 116 | 341 |
| | | start | | ETX/Bacillus mosquitocidal toxin | | |
| | | | | MTX2 | | |
| APG07452.2 | 362 | Signal | PF03318 | Clostridium epsilon toxin | 84 | 310 |
| | | peptide | | ETX/Bacillus mosquitocidal toxin | | |
| | | removed | | MTX2 | | |
| APG07891.0 | 363 | | PF14200 | Ricin-type beta-trefoil lectin | 12 | 87 |
| | | | | domain-like | | |
| | | | PF14200 | Ricin-type beta-trefoil lectin | 97 | 159 |
| | | | | domain-like | | |
| | | | PF05431 | Insecticidal Crystal Toxin, P42 | 190 | 353 |
| APG07891.1 | 364 | Alternate | PF14200 | Ricin-type beta-trefoil lectin | 8 | 83 |
| | | start | | domain-like | | |
| | | | PF14200 | Ricin-type beta-trefoil lectin | 93 | 155 |
| | | | | domain-like | | |
| | | | PF05431 | Insecticidal Crystal Toxin, P42 | 186 | 349 |
| APG08547.0 | 365 | | PF03318 | Clostridium epsilon toxin | 82 | 239 |
| | | | | ETX/Bacillus mosquitocidal toxin | | |
| | | | | MTX2 | | |
| APG08547.1 | 366 | Signal | PF03318 | Clostridium epsilon toxin | 51 | 208 |
| | | peptide | | ETX/Bacillus mosquitocidal toxin | | |
| | | removed | | MTX2 | | |
| APG09091.0 | 367 | | PF03318 | Clostridium epsilon toxin | 226 | 354 |
| | | | | ETX/Bacillus mosquitocidal toxin | | |
| | | | | MTX2 | | |
| APG09091.1 | 368 | Signal | PF03318 | Clostridium epsilon toxin | 198 | 327 |
| | | peptide | | ETX/Bacillus mosquitocidal toxin | | |
| | | removed | | MTX2 | | |
| APG09392.0 | 369 | | PF03318 | Clostridium epsilon toxin | 84 | 291 |
| | | | | ETX/Bacillus mosquitocidal toxin | | |
| | | | | MTX2 | | |
| APG09392.1 | 370 | Signal | PF03318 | Clostridium epsilon toxin | 51 | 258 |
| | | peptide | | ETX/Bacillus mosquitocidal toxin | | |
| | | removed | | MTX2 | | |
| APG09536.0 | 371 | | PF03945 | delta endotoxin, N-terminal | 98 | 271 |
| | | | | domain | | |
| | | | PF00555 | delta endotoxin | 337 | 413 |
| | | | PF03944 | delta endotoxin | 536 | 668 |
| APG09536.1 | 372 | Alternate | PF03945 | delta endotoxin, N-terminal | 73 | 246 |
| | | start | | domain | | |
| | | | PF00555 | delta endotoxin | 312 | 388 |
| | | | PF03944 | delta endotoxin | 511 | 643 |
| APG00885.0 | 373 | | PF00388 | Phosphatidylinositol-specific | 79 | 197 |
| | | | | phospholipase C, X domain | | |
| APG01466.0 | 374 | | no PFAM | | | |
| | | | domains | | | |
| APG01466.1 | 375 | Alternate | no PFAM | | | |
| | | start | domains | | | |
| APG01762.0 | 376 | | PF14200 | Ricin-type beta-trefoil lectin | 12 | 88 |
| | | | | domain-like | | |
| | | | PF14200 | Ricin-type beta-trefoil lectin | 97 | 159 |
| | | | | domain-like | | |
| | | | PF05431 | Insecticidal Crystal Toxin, P42 | 190 | 353 |
| APG01762.1 | 377 | Alternate | PF14200 | Ricin-type beta-trefoil lectin | 8 | 84 |
| | | start | | domain-like | | |
| | | | PF14200 | Ricin-type beta-trefoil lectin | 93 | 155 |
| | | | | domain-like | | |
| | | | PF05431 | Insecticidal Crystal Toxin, P42 | 186 | 349 |
| APG01823.0 | 378 | | no PFAM | | | |
| | | | domains | | | |
| APG01823.1 | 379 | Alternate | no PFAM | | | |
| | | start | domains | | | |
| APG02655.0 | 380 | | PF03318 | Clostridium epsilon toxin | 95 | 313 |
| | | | | ETX/Bacillus mosquitocidal toxin | | |
| | | | | MTX2 | | |
| APG02655.1 | 381 | Signal | PF03318 | Clostridium epsilon toxin | 65 | 283 |
| | | peptide | | ETX/Bacillus mosquitocidal toxin | | |
| | | removed | | MTX2 | | |
| APG02862.0 | 382 | | PF03318 | Clostridium epsilon toxin | 84 | 291 |
| | | | | ETX/Bacillus mosquitocidal toxin | | |
| | | | | MTX2 | | |
| APG02862.1 | 383 | Signal | PF03318 | Clostridium epsilon toxin | 51 | 258 |
| | | peptide | | ETX/Bacillus mosquitocidal toxin | | |
| | | removed | | MTX2 | | |
| APG02990.0 | 384 | | PF03318 | Clostridium epsilon toxin | 92 | 282 |
| | | | | ETX/Bacillus mosquitocidal toxin | | |
| | | | | MTX2 | | |
| APG02990.1 | 385 | Signal | PF03318 | Clostridium epsilon toxin | 60 | 250 |
| | | peptide | | ETX/Bacillus mosquitocidal toxin | | |
| | | removed | | MTX2 | | |
| APG04672.0 | 386 | | PF07691 | PA14 domain | 92 | 176 |
| | | | PF03495 | Clostridial binary toxin | 203 | 278 |
| | | | | B/anthrax toxin PA Ca-binding | | |
| | | | | domain | | |
| | | | PF17475 | Clostridial binary toxin | 281 | 473 |
| | | | | B/anthrax toxin PA domain 2 | | |
| | | | PF17476 | Clostridial binary toxin | 513 | 597 |
| | | | | B/anthrax toxin PA domain 3 | | |
| APG04672.1 | 387 | Signal | PF07691 | PA14 domain | 65 | 149 |
| | | peptide | | | | |
| | | removed | | | | |
| | | | PF03495 | Clostridial binary toxin | 176 | 251 |
| | | | | B/anthrax toxin PA Ca-binding | | |
| | | | | domain | | |
| | | | PF17475 | Clostridial binary toxin | 254 | 446 |
| | | | | B/anthrax toxin PA domain 2 | | |
| | | | PF17476 | Clostridial binary toxin | 486 | 570 |
| | | | | B/anthrax toxin PA domain 3 | | |
| APG05717.0 | 388 | | PF14200 | Ricin-type beta-trefoil lectin | 38 | 97 |
| | | | | domain-like | | |
| | | | PF05431 | Insecticidal Crystal Toxin, P42 | 208 | 368 |
| APG05717.1 | 389 | Alternate | PF14200 | Ricin-type beta-trefoil lectin | 37 | 96 |
| | | start | | domain-like | | |
| | | | PF05431 | Insecticidal Crystal Toxin, P42 | 207 | 367 |
| APG07877.0 | 390 | | PF14200 | Ricin-type beta-trefoil lectin | 33 | 102 |
| | | | | domain-like | | |
| | | | PF05431 | Insecticidal Crystal Toxin, P42 | 231 | 391 |
| APG07877.1 | 391 | Signal | PF14200 | Ricin-type beta-trefoil lectin | 6 | 75 |
| | | peptide | | domain-like | | |
| | | removed | | | | |
| | | | PF05431 | Insecticidal Crystal Toxin, P42 | 204 | 364 |
| APG08067.0 | 392 | | PF03945 | delta endotoxin, N-terminal | 73 | 279 |
| | | | | domain | | |
| | | | PF03944 | delta endotoxin | 469 | 614 |
| APG08067.1 | 393 | 3′ Truncation | PF03945 | delta endotoxin, N-terminal | 73 | 279 |
| | | | | domain | | |
| | | | PF03944 | delta endotoxin | 469 | 614 |

[0049] Recombinant or synthetic nucleic acids encoding the pesticidal polypeptides disclosed herein are also provided. Of particular interest are nucleic acid sequences that have been designed for expression in a plant of interest. That is, the nucleic acid sequence can be optimized for increased expression in a host plant. A pesticidal protein of the invention can be back-translated to produce a nucleic acid comprising codons optimized for expression in a particular host, for example, a crop plant. In another embodiment, the polynucleotides encoding the polypeptides provided herein may be optimized for increased expression in the transformed plant. That is, the polynucleotides can be synthesized using plant-preferred codons for improved expression. See, for example, Campbell and Gowri (1990) Plant Physiol. 92:1-11 for a discussion of host-preferred codon usage. Methods are available in the art for synthesizing plant-preferred genes. See, for example, U.S. Pat. Nos. 5,380,831, and 5,436,391, and Murray et al. (1989) Nucleic Acids Res. 17:477-498, herein incorporated by reference. Expression of such a coding sequence by the transformed plant (e.g., dicot or monocot) will result in the production of a pesticidal polypeptide and confer increased resistance in the plant to a pest. Recombinant and synthetic nucleic acid molecules encoding the pesticidal proteins of the invention do not include the naturally occurring bacterial sequence encoding the protein.

[0050] A “recombinant polynucleotide” or “recombinant nucleic acid” comprises a combination of two or more chemically linked nucleic acid segments which are not found directly joined in nature. By “directly joined” is intended the two nucleic acid segments are immediately adjacent and joined to one another by a chemical linkage. In specific embodiments, the recombinant polynucleotide comprises a polynucleotide of interest or a variant or fragment thereof such that an additional chemically linked nucleic acid segment is located either 5′, 3′ or internal to the polynucleotide of interest. Alternatively, the chemically-linked nucleic acid segment of the recombinant polynucleotide can be formed by deletion of a sequence. The additional chemically linked nucleic acid segment or the sequence deleted to join the linked nucleic acid segments can be of any length, including for example, 1, 2, 3, 4, 5, 6.7, 8, 9, 10, 15, 20 or greater nucleotides. Various methods for making such recombinant polynucleotides include chemical synthesis or by the manipulation of isolated segments of polynucleotides by genetic engineering techniques. In specific embodiments, the recombinant polynucleotide can comprise a recombinant DNA sequence or a recombinant RNA sequence. A “fragment of a recombinant polynucleotide or nucleic acid” comprises at least one of a combination of two or more chemically linked amino acid segments which are not found directly joined in nature.

[0051] Fragments of a polynucleotide (RNA or DNA) may encode protein fragments that retain activity. In specific embodiments, a fragment of a recombinant polynucleotide or a recombinant polynucleotide construct comprises at least one junction of the two or more chemically linked or operably linked nucleic acid segments which are not found directly joined nature. A fragment of a polynucleotide that encodes a biologically active portion of a polypeptide that retains pesticidal activity will encode at least 25, 30, 40, 50, 60, 70, 75, 80, 90, 100, 110, 120, 125, 130, 140, 150, 160, 170, 175, 180, contiguous amino acids, or up to the total number of amino acids present in a full-length polypeptide as set forth in SEQ ID NO: 1, 2, 3, 4, 5, 6, 7, 8, 9, 10, 11, 12, 13, 14, 15, 16, 17, 18, 19, 20, 21, 22, 23, 24, 25, 26, 27, 28, 29, 30, 31, 32, 33, 34, 35, 36, 37, 38, 39, 40, 41, 42, 43, 44, 45, 46, 47, 48, 49, 50, 51, 52, 53, 54, 55, 56, 57, 58, 59, 60, 61, 62, 63, 64, 65, 66, 67, 68, 69, 70, 71, 72, 73, 74, 75, 76, 77, 78, 79, 80, 81, 82, 83, 84, 85, 86, 87, 88, 89, 90, 91, 92, 93, 94, 95, 96, 97, 98, 99, 100, 101, 102, 103, 104, 105, 106, 107, 108, 109, 110, 111, 112, 113, 114, 115, 116, 117, 118, 119, 120, 121, 122, 123, 124, 125, 126, 127, 128, 129, 130, 131, 132, 133, 134, 135, 136, 137, 138, 139, 140, 141, 142, 143, 144, 145, 146, 147, 148, 149, 150, 151, 152, 153, 154, 155, 156, 157, 158, 159, 160, 161, 162, 163, 164, 165, 166, 167, 168, 169, 170, 171, 172, 173, 174, 175, 176, 177, 178, 179, 180, 181, 182, 183, 184, 185, 186, 187, 188, 189, 190, 191, 192, 193, 194, 195, 196, 197, 198, 199, 200, 201, 202, 203, 204, 205, 206, 207, 208, 209, 210, 211, 212, 213, 214, 215, 216, 217, 218, 219, 220, 221, 222, 223, 224, 225, 226, 227, 228, 229, 230, 231, 232, 233, 234, 235, 236, 237, 238, 239, 240, 241, 242, 243, 244, 245, 246, 247, 248, 249, 250, 251, 252, 253, 254, 255, 256, 257, 258, 259, 260, 261, 262, 263, 264, 265, 266, 267, 268, 269, 270, 271, 272, 273, 274, 275, 276, 277, 278, 279, 280, 281, 282, 283, 284, 285, 286, 287, 288, 289, 290, 291, 292, 293, 294, 295, 296, 297, 298, 299, 300, 301, 302, 303, 304, 305, 306, 307, 308, 309, 310, 311, 312, 313, 314, 315, 316, 317, 318, 319, 320, 321, 322, 323, 324, 325, 326, 327, 328, 329, 330, 331, 332, 333, 334, 335, 336, 337, 338, 339, 340, 341, 342, 343, 344, 345, 346, 347, 348, 349, 350, 351, 352, 353, 354, 355, 356, 357, 358, 359, 360, 361, 362, 363, 364, 365, 366, 367, 368, 369, 370, 371, 372, 373, 374, 375, 376, 377, 378, 379, 380, 381, 382, 383, 384, 385, 386, 387, 388, 389, 390, 391, 392, and/or 393. In specific embodiments, such polypeptide fragments are active fragment, and in still other embodiments, the polypeptide fragment comprises a recombinant polypeptide fragment. As used herein, a fragment of a recombinant polypeptide comprises at least one of a combination of two or more chemically linked amino acid segments which are not found directly joined in nature.

[0052] By “Variants” is intended to mean substantially similar sequences. For polynucleotides, a variant comprises a deletion and/or addition of one or more nucleotides at one or more internal sites within the native polynucleotide and/or a substitution of one or more nucleotides at one or more sites in the native polynucleotide. As used herein, a “native” polynucleotide or polypeptide comprises a naturally occurring nucleotide sequence or amino acid sequence, respectively.

[0053] Variants of a particular polynucleotide of the invention (i.e., the reference polynucleotide) can also be evaluated by comparison of the percent sequence identity between the polypeptide encoded by a variant polynucleotide and the polypeptide encoded by the reference polynucleotide. Thus, for example, an isolated polynucleotide that encodes a polypeptide with a given percent sequence identity to the polypeptide of SEQ ID NO: 1, 2, 3, 4, 5, 6, 7, 8, 9, 10, 11, 12, 13, 14, 15, 16, 17, 18, 19, 20, 21, 22, 23, 24, 25, 26, 27, 28, 29, 30, 31, 32, 33, 34, 35, 36, 37, 38, 39, 40, 41, 42, 43, 44, 45, 46, 47, 48, 49, 50, 51, 52, 53, 54, 55, 56, 57, 58, 59, 60, 61, 62, 63, 64, 65, 66, 67, 68, 69, 70, 71, 72, 73, 74, 75, 76, 77, 78, 79, 80, 81, 82, 83, 84, 85, 86, 87, 88, 89, 90, 91, 92, 93, 94, 95, 96, 97, 98, 99, 100, 101, 102, 103, 104, 105, 106, 107, 108, 109, 110, 111, 112, 113, 114, 115, 116, 117, 118, 119, 120, 121, 122, 123, 124, 125, 126, 127, 128, 129, 130, 131, 132, 133, 134, 135, 136, 137, 138, 139, 140, 141, 142, 143, 144, 145, 146, 147, 148, 149, 150, 151, 152, 153, 154, 155, 156, 157, 158, 159, 160, 161, 162, 163, 164, 165, 166, 167, 168, 169, 170, 171, 172, 173, 174, 175, 176, 177, 178, 179, 180, 181, 182, 183, 184, 185, 186, 187, 188, 189, 190, 191, 192, 193, 194, 195, 196, 197, 198, 199, 200, 201, 202, 203, 204, 205, 206, 207, 208, 209, 210, 211, 212, 213, 214, 215, 216, 217, 218, 219, 220, 221, 222, 223, 224, 225, 226, 227, 228, 229, 230, 231, 232, 233, 234, 235, 236, 237, 238, 239, 240, 241, 242, 243, 244, 245, 246, 247, 248, 249, 250, 251, 252, 253, 254, 255, 256, 257, 258, 259, 260, 261, 262, 263, 264, 265, 266, 267, 268, 269, 270, 271, 272, 273, 274, 275, 276, 277, 278, 279, 280, 281, 282, 283, 284, 285, 286, 287, 288, 289, 290, 291, 292, 293, 294, 295, 296, 297, 298, 299, 300, 301, 302, 303, 304, 305, 306, 307, 308, 309, 310, 311, 312, 313, 314, 315, 316, 317, 318, 319, 320, 321, 322, 323, 324, 325, 326, 327, 328, 329, 330, 331, 332, 333, 334, 335, 336, 337, 338, 339, 340, 341, 342, 343, 344, 345, 346, 347, 348, 349, 350, 351, 352, 353, 354, 355, 356, 357, 358, 359, 360, 361, 362, 363, 364, 365, 366, 367, 368, 369, 370, 371, 372, 373, 374, 375, 376, 377, 378, 379, 380, 381, 382, 383, 384, 385, 386, 387, 388, 389, 390, 391, 392, and/or 393 are disclosed. Percent sequence identity between any two polypeptides can be calculated using sequence alignment programs and parameters described elsewhere herein. Where any given pair of polynucleotides of the invention is evaluated by comparison of the percent sequence identity shared by the two polypeptides they encode, the percent sequence identity between the two encoded polypeptides is at least about 40%, 45%, 50%, 55%, 60%, 65%, 70%, 75%, 80%, 85%, 86%, 87%, 88%, 89%, 90%, 91%, 92%, 93%, 94%, 95%, 96%, 97%, 98%, 99% or more sequence identity to SEQ ID NO: 1, 2, 3, 4, 5, 6, 7, 8, 9, 10, 11, 12, 13, 14, 15, 16, 17, 18, 19, 20, 21, 22, 23, 24, 25, 26, 27, 28, 29, 30, 31, 32, 33, 34, 35, 36, 37, 38, 39, 40, 41, 42, 43, 44, 45, 46, 47, 48, 49, 50, 51, 52, 53, 54, 55, 56, 57, 58, 59, 60, 61, 62, 63, 64, 65, 66, 67, 68, 69, 70, 71, 72, 73, 74, 75, 76, 77, 78, 79, 80, 81, 82, 83, 84, 85, 86, 87, 88, 89, 90, 91, 92, 93, 94, 95, 96, 97, 98, 99, 100, 101, 102, 103, 104, 105, 106, 107, 108, 109, 110, 111, 112, 113, 114, 115, 116, 117, 118, 119, 120, 121, 122, 123, 124, 125, 126, 127, 128, 129, 130, 131, 132, 133, 134, 135, 136, 137, 138, 139, 140, 141, 142, 143, 144, 145, 146, 147, 148, 149, 150, 151, 152, 153, 154, 155, 156, 157, 158, 159, 160, 161, 162, 163, 164, 165, 166, 167, 168, 169, 170, 171, 172, 173, 174, 175, 176, 177, 178, 179, 180, 181, 182, 183, 184, 185, 186, 187, 188, 189, 190, 191, 192, 193, 194, 195, 196, 197, 198, 199, 200, 201, 202, 203, 204, 205, 206, 207, 208, 209, 210, 211, 212, 213, 214, 215, 216, 217, 218, 219, 220, 221, 222, 223, 224, 225, 226, 227, 228, 229, 230, 231, 232, 233, 234, 235, 236, 237, 238, 239, 240, 241, 242, 243, 244, 245, 246, 247, 248, 249, 250, 251, 252, 253, 254, 255, 256, 257, 258, 259, 260, 261, 262, 263, 264, 265, 266, 267, 268, 269, 270, 271, 272, 273, 274, 275, 276, 277, 278, 279, 280, 281, 282, 283, 284, 285, 286, 287, 288, 289, 290, 291, 292, 293, 294, 295, 296, 297, 298, 299, 300, 301, 302, 303, 304, 305, 306, 307, 308, 309, 310, 311, 312, 313, 314, 315, 316, 317, 318, 319, 320, 321, 322, 323, 324, 325, 326, 327, 328, 329, 330, 331, 332, 333, 334, 335, 336, 337, 338, 339, 340, 341, 342, 343, 344, 345, 346, 347, 348, 349, 350, 351, 352, 353, 354, 355, 356, 357, 358, 359, 360, 361, 362, 363, 364, 365, 366, 367, 368, 369, 370, 371, 372, 373, 374, 375, 376, 377, 378, 379, 380, 381, 382, 383, 384, 385, 386, 387, 388, 389, 390, 391, 392, and/or 393. In other embodiments, the variant of the polynucleotide provided herein differs from the native sequence by at least 1, 2, 3, 4, 5, 6, 7, 8, 9, 10 or more nucleotides.

[0054] Variant polynucleotide and proteins also encompass sequences and proteins derived from a mutagenic and recombinogenic procedure such as DNA shuffling. With such a procedure, one or more different pesticidal protein disclosed herein (SEQ ID NO: 1, 2, 3, 4, 5, 6, 7, 8, 9, 10, 11, 12, 13, 14, 15, 16, 17, 18, 19, 20, 21, 22, 23, 24, 25, 26, 27, 28, 29, 30, 31, 32, 33, 34, 35, 36, 37, 38, 39, 40, 41, 42, 43, 44, 45, 46, 47, 48, 49, 50, 51, 52, 53, 54, 55, 56, 57, 58, 59, 60, 61, 62, 63, 64, 65, 66, 67, 68, 69, 70, 71, 72, 73, 74, 75, 76, 77, 78, 79, 80, 81, 82, 83, 84, 85, 86, 87, 88, 89, 90, 91, 92, 93, 94, 95, 96, 97, 98, 99, 100, 101, 102, 103, 104, 105, 106, 107, 108, 109, 110, 111, 112, 113, 114, 115, 116, 117, 118, 119, 120, 121, 122, 123, 124, 125, 126, 127, 128, 129, 130, 131, 132, 133, 134, 135, 136, 137, 138, 139, 140, 141, 142, 143, 144, 145, 146, 147, 148, 149, 150, 151, 152, 153, 154, 155, 156, 157, 158, 159, 160, 161, 162, 163, 164, 165, 166, 167, 168, 169, 170, 171, 172, 173, 174, 175, 176, 177, 178, 179, 180, 181, 182, 183, 184, 185, 186, 187, 188, 189, 190, 191, 192, 193, 194, 195, 196, 197, 198, 199, 200, 201, 202, 203, 204, 205, 206, 207, 208, 209, 210, 211, 212, 213, 214, 215, 216, 217, 218, 219, 220, 221, 222, 223, 224, 225, 226, 227, 228, 229, 230, 231, 232, 233, 234, 235, 236, 237, 238, 239, 240, 241, 242, 243, 244, 245, 246, 247, 248, 249, 250, 251, 252, 253, 254, 255, 256, 257, 258, 259, 260, 261, 262, 263, 264, 265, 266, 267, 268, 269, 270, 271, 272, 273, 274, 275, 276, 277, 278, 279, 280, 281, 282, 283, 284, 285, 286, 287, 288, 289, 290, 291, 292, 293, 294, 295, 296, 297, 298, 299, 300, 301, 302, 303, 304, 305, 306, 307, 308, 309, 310, 311, 312, 313, 314, 315, 316, 317, 318, 319, 320, 321, 322, 323, 324, 325, 326, 327, 328, 329, 330, 331, 332, 333, 334, 335, 336, 337, 338, 339, 340, 341, 342, 343, 344, 345, 346, 347, 348, 349, 350, 351, 352, 353, 354, 355, 356, 357, 358, 359, 360, 361, 362, 363, 364, 365, 366, 367, 368, 369, 370, 371, 372, 373, 374, 375, 376, 377, 378, 379, 380, 381, 382, 383, 384, 385, 386, 387, 388, 389, 390, 391, 392, and/or 393) is manipulated to create a new pesticidal protein possessing the desired properties. In this manner, libraries of recombinant polynucleotides are generated from a population of related sequence polynucleotides comprising sequence regions that have substantial sequence identity and can be homologously recombined in vitro or in vivo. For example, using this approach, sequence motifs encoding a domain of interest may be shuffled between the pesticidial sequences provided herein and other known pesticidial genes to obtain a new gene coding for a protein with an improved property of interest, such as an increased Kₘ in the case of an enzyme. Strategies for such DNA shuffling are known in the art. See, for example, Stemmer (1994) Proc. Natl. Acad. Sci. USA 91:10747-10751; Stemmer (1994) Nature 370:389-391; Crameri et al. (1997) Nature Biotech. 15:436-438; Moore et al. (1997) J. Mol. Biol. 272:336-347; Zhang et al. (1997) Proc. Natl. Acad. Sci. USA 94:4504-4509; Crameri et al. (1998) Nature 391:288-291; and U.S. Pat. Nos. 5,605,793 and 5,837,458. A “shuffled” nucleic acid is a nucleic acid produced by a shuffling procedure such as any shuffling procedure set forth herein. Shuffled nucleic acids are produced by recombining (physically or virtually) two or more nucleic acids (or character strings), for example in an artificial, and optionally recursive, fashion. Generally, one or more screening steps are used in shuffling processes to identify nucleic acids of interest; this screening step can be performed before or after any recombination step. In some (but not all) shuffling embodiments, it is desirable to perform multiple rounds of recombination prior to selection to increase the diversity of the pool to be screened. The overall process of recombination and selection are optionally repeated recursively. Depending on context, shuffling can refer to an overall process of recombination and selection, or, alternately, can simply refer to the recombinational portions of the overall process.

[0055] In one embodiments, a method of obtaining a polynucleotide that encodes an improved polypeptide comprising pesticidal activity is provided, wherein the improved polypeptide has at least one improved property over any one of SEQ ID NOS: 1-393. Such methods can comprises (a) recombining a plurality of parental polynucleotides to produce a library of recombinant polynucleotides encoding recombinant pesticidal polypeptides; (b) screening the library to identify a recombinant polynucleotide that encodes an improved recombinant pesticidal polypeptide that has an enhanced property improved over the parental polynucleotide; (c) recovering the recombinant polynucleotide that encodes the improved recombinant pesticidal polypeptide identified in (b); and, (d) repeating steps (a), (b) and (c) using the recombinant polynucleotide recovered in step (c) as one of the plurality of parental polynucleotides in repeated step (a).

[0056] iii. Sequence Comparisons

[0057] As used herein, the term “identity” or “percent identity” when used with respect to a particular pair of aligned amino acid sequences, refers to the percent amino acid sequence identity that is obtained by counting the number of identical matches in the alignment and dividing such number of identical matches by the length of the aligned sequences. As used herein, the term “similarity” or “percent similarity” when used with respect to a particular pair of aligned amino acid sequences, refers to the sum of the scores that are obtained from a scoring matrix for each amino acid pair in the alignment divided by the length of the aligned sequences.

[0058] Unless otherwise stated, identity and similarity will be calculated by the Needleman-Wunsch global alignment and scoring algorithms (Needleman and Wunsch (1970) J. Mol. Biol. 48(3):443-453) as implemented by the “needle” program, distributed as part of the EMBOSS software package (Rice, P. Longden, I. and Bleasby, A., EMBOSS: The European Molecular Biology Open Software Suite, 2000, Trends in Genetics 16, (6) pp 276-277, versions 6.3.1 available from EMBnet at embnet.org/resource/emboss and emboss.sourceforge.net, among other sources) using default gap penalties and scoring matrices (EBLOSUM62 for protein and EDNAFULL for DNA). Equivalent programs may also be used. By “equivalent program” is intended any sequence comparison program that, for any two sequences in question, generates an alignment having identical nucleotide residue matches and an identical percent sequence identity when compared to the corresponding alignment generated by needle from EMBOSS version 6.3.1.

[0059] Additional mathematical algorithms are known in the art and can be utilized for the comparison of two sequences. See, for example, the algorithm of Karlin and Altschul (1990) Proc. Natl. Acad. Sci. USA 87:2264, modified as in Karlin and Altschul (1993) Proc. Natl. Acad. Sci. USA 90:5873-5877. Such an algorithm is incorporated into the BLAST programs of Altschul et al. (1990) J. Mol. Biol. 215:403. BLAST nucleotide searches can be performed with the BLASTN program (nucleotide query searched against nucleotide sequences) to obtain nucleotide sequences homologous to pesticidal-like nucleic acid molecules of the invention, or with the BLASTX program (translated nucleotide query searched against protein sequences) to obtain protein sequences homologous to pesticidal nucleic acid molecules of the invention. BLAST protein searches can be performed with the BLASTP program (protein query searched against protein sequences) to obtain amino acid sequences homologous to pesticidal protein molecules of the invention, or with the TBLASTN program (protein query searched against translated nucleotide sequences) to obtain nucleotide sequences homologous to pesticidal protein molecules of the invention. To obtain gapped alignments for comparison purposes, Gapped BLAST (in BLAST 2.0) can be utilized as described in Altschul et al. (1997) Nucleic Acids Res. 25:3389. Alternatively, PSI-Blast can be used to perform an iterated search that detects distant relationships between molecules. See Altschul et al. (1997) supra. When utilizing BLAST, Gapped BLAST, and PSI-Blast programs, the default parameters of the respective programs (e.g., BLASTX and BLASTN) can be used. Alignment may also be performed manually by inspection.

[0060] Two sequences are “optimally aligned” when they are aligned for similarity scoring using a defined amino acid substitution matrix (e.g., BLOSUM62), gap existence penalty and gap extension penalty so as to arrive at the highest score possible for that pair of sequences. Amino acid substitution matrices and their use in quantifying the similarity between two sequences are well-known in the art and described, e.g., in Dayhoff et al. (1978) “A model of evolutionary change in proteins.” In “Atlas of Protein Sequence and Structure,” Vol. 5, Suppl. 3 (ed. M. O. Dayhoff), pp. 345-352. Natl. Biomed. Res. Found., Washington, D.C. and Henikoff et al. (1992) Proc. Natl. Acad. Sci. USA 89:10915-10919. The BLOSUM62 matrix is often used as a default scoring substitution matrix in sequence alignment protocols. The gap existence penalty is imposed for the introduction of a single amino acid gap in one of the aligned sequences, and the gap extension penalty is imposed for each additional empty amino acid position inserted into an already opened gap. The alignment is defined by the amino acids positions of each sequence at which the alignment begins and ends, and optionally by the insertion of a gap or multiple gaps in one or both sequences, so as to arrive at the highest possible score. While optimal alignment and scoring can be accomplished manually, the process is facilitated by the use of a computer-implemented alignment algorithm, e.g., gapped BLAST 2.0, described in Altschul et al. (1997) Nucleic Acids Res. 25:3389-3402, and made available to the public at the National Center for Biotechnology Information Website (www.ncbi.nlm.nih.gov). Optimal alignments, including multiple alignments, can be prepared using, e.g., PSI-BLAST, available through www.ncbi.nlm.nih.gov and described by Altschul et al. (1997) Nucleic Acids Res. 25:3389-3402.

[0061] With respect to an amino acid sequence that is optimally aligned with a reference sequence, an amino acid residue “corresponds to” the position in the reference sequence with which the residue is paired in the alignment. The “position” is denoted by a number that sequentially identifies each amino acid in the reference sequence based on its position relative to the N-terminus. For example, in SEQ ID NO: 1 position 1 is M, position 2 is K, position 3 is S, etc. When a test sequence is optimally aligned with SEQ ID NO: 1, a residue in the test sequence that aligns with the S at position 3 is said to “correspond to position 3” of SEQ ID NO: 1. Owing to deletions, insertion, truncations, fusions, etc., that must be taken into account when determining an optimal alignment, in general the amino acid residue number in a test sequence as determined by simply counting from the N-terminal will not necessarily be the same as the number of its corresponding position in the reference sequence. For example, in a case where there is a deletion in an aligned test sequence, there will be no amino acid that corresponds to a position in the reference sequence at the site of deletion. Where there is an insertion in an aligned reference sequence, that insertion will not correspond to any amino acid position in the reference sequence. In the case of truncations or fusions there can be stretches of amino acids in either the reference or aligned sequence that do not correspond to any amino acid in the corresponding sequence.

[0062] iv. Antibodies

[0063] Antibodies to the polypeptides of the present invention, or to variants or fragments thereof, are also encompassed. Methods for producing antibodies are well known in the art (see, for example, Harlow and Lane (1988) Antibodies: A Laboratory Manual, Cold Spring Harbor Laboratory, Cold Spring Harbor, N.Y.; and U.S. Pat. No. 4,196,265). These antibodies can be used in kits for the detection and isolation of toxin polypeptides. Thus, this disclosure provides kits comprising antibodies that specifically bind to the polypeptides described herein, including, for example, polypeptides having the sequence of SEQ ID NOs: 1, 2, 3, 4, 5, 6, 7, 8, 9, 10, 11, 12, 13, 14, 15, 16, 17, 18, 19, 20, 21, 22, 23, 24, 25, 26, 27, 28, 29, 30, 31, 32, 33, 34, 35, 36, 37, 38, 39, 40, 41, 42, 43, 44, 45, 46, 47, 48, 49, 50, 51, 52, 53, 54, 55, 56, 57, 58, 59, 60, 61, 62, 63, 64, 65, 66, 67, 68, 69, 70, 71, 72, 73, 74, 75, 76, 77, 78, 79, 80, 81, 82, 83, 84, 85, 86, 87, 88, 89, 90, 91, 92, 93, 94, 95, 96, 97, 98, 99, 100, 101, 102, 103, 104, 105, 106, 107, 108, 109, 110, 111, 112, 113, 114, 115, 116, 117, 118, 119, 120, 121, 122, 123, 124, 125, 126, 127, 128, 129, 130, 131, 132, 133, 134, 135, 136, 137, 138, 139, 140, 141, 142, 143, 144, 145, 146, 147, 148, 149, 150, 151, 152, 153, 154, 155, 156, 157, 158, 159, 160, 161, 162, 163, 164, 165, 166, 167, 168, 169, 170, 171, 172, 173, 174, 175, 176, 177, 178, 179, 180, 181, 182, 183, 184, 185, 186, 187, 188, 189, 190, 191, 192, 193, 194, 195, 196, 197, 198, 199, 200, 201, 202, 203, 204, 205, 206, 207, 208, 209, 210, 211, 212, 213, 214, 215, 216, 217, 218, 219, 220, 221, 222, 223, 224, 225, 226, 227, 228, 229, 230, 231, 232, 233, 234, 235, 236, 237, 238, 239, 240, 241, 242, 243, 244, 245, 246, 247, 248, 249, 250, 251, 252, 253, 254, 255, 256, 257, 258, 259, 260, 261, 262, 263, 264, 265, 266, 267, 268, 269, 270, 271, 272, 273, 274, 275, 276, 277, 278, 279, 280, 281, 282, 283, 284, 285, 286, 287, 288, 289, 290, 291, 292, 293, 294, 295, 296, 297, 298, 299, 300, 301, 302, 303, 304, 305, 306, 307, 308, 309, 310, 311, 312, 313, 314, 315, 316, 317, 318, 319, 320, 321, 322, 323, 324, 325, 326, 327, 328, 329, 330, 331, 332, 333, 334, 335, 336, 337, 338, 339, 340, 341, 342, 343, 344, 345, 346, 347, 348, 349, 350, 351, 352, 353, 354, 355, 356, 357, 358, 359, 360, 361, 362, 363, 364, 365, 366, 367, 368, 369, 370, 371, 372, 373, 374, 375, 376, 377, 378, 379, 380, 381, 382, 383, 384, 385, 386, 387, 388, 389, 390, 391, 392, and/or 393.

### II. Pests

[0064] The compositions and methods provided herein are useful against a variety of pests. “Pests” includes but is not limited to, insects, fungi, bacteria, nematodes, acarids, protozoan pathogens, animal-parasitic liver flukes, and the like. Pests of particular interest are insect pests, particularly insect pests that cause significant damage to agricultural plants. Insect pests include insects selected from the orders Coleoptera, Diptera, Hymenoptera, Lepidoptera, Mallophaga, Homoptera, Hemiptera, Orthroptera, Thysanoptera, Dermaptera, Isoptera, Anoplura, Siphonaptera, Trichoptera, or nematodes.

[0065] In non-limiting embodiments, the insect pest comprises Western corn rootworm, Diabrotica virgifera virgifera; Fall armyworm, Spodoptera frugiperda; Colorado potato beetle, Leptinotarsa decemlineata; Corn earworm, Helicoverpa zea (in North America same species attacks cotton and called cotton bollworm); European corn borer, Ostrinia nubilalis; Black cutworm, Agrotis ipsilon; Diamondback moth, Plutella xylostella; Velvetbean caterpillar, Anticarsia gemmatalis; Southwestern corn borer, Diatraea grandiosella; Cotton bollworm, Helicoverpa armigera (found other than USA in rest of the world); Southern green stinkbug, Nezara viridula; Green stinkbug, Chinavia halaris; Brown marmorated stinkbug, Halyomorpha halys; and Brown stinbug, Euschistus servus, Euschistus heros (Neotropical brown stink bug OR soy stink bug); Piezodorus guildinii (red-banded stink bug); Dichelops melacanthus (no common name) and/or Dichelops furcatus (no common name); an aphid, such as a soybean aphid. In other embodiments, the pest comprises a nematode including, but not limited to, Meloidogyne hapla (Northern root-knot nematode); Meloidogyne enterolobii, Meloidogyne arenaria (peanut root-knot nematode); and Meloidogyne javanica.

[0066] The term “insect pests” as used herein refers to insects and other similar pests such as, for example, those of the order Acari including, but not limited to, mites and ticks. Insect pests of the present invention include, but are not limited to, insects of the order Lepidoptera, e.g. Achoroia grisella, Acleris gloverana, Acleris variana, Adoxophyes orana, Agrotis ipsilon, Alabama argillacea, Alsophila pometaria, Amyelois transitella, Anagasta kuehniella, Anarsia lineatella, Anisota senatoria, Antheraea pernyi, Anticarsia gemmatalis, Archips sp., Argyrotaenia sp., Athetis mindara, Bombyx mori, Bucculatrix thurberiella, Cadra cautella, Choristoneura sp., Cochylls hospes, Colias eurytheme, Corcyra cephalonica, Cydia latiferreanus, Cydia pomonella, Datana integerrima, Dendrolimus sibericus, Desmiafeneralis, Diaphania hyalinata, Diaphania nitidalis, Diatraea grandiosella, Diatraea saccharalis, Ennomos subsignaria, Eoreuma loftini, Esphestia elutella, Erannis tilaria, Estigmene acrea, Eulia salubricola, Eupocoellia ambiguella, Eupoecilia ambiguella, Euproctis chrysorrhoea, Euxoa messoria, Galleria mellonella, Grapholita molesta, Harrisina americana, Helicoverpa subflexa, Helicoverpa zea, Heliothis virescens, Hemileuca oliviae, Homoeosoma electellum, Hyphantia cunea, Keiferia lycopersicella, Lambdina fiscellaria fiscellaria, Lambdina fiscellaria lugubrosa, Leucoma salicis, Lobesia botrana, Loxostege sticticalis, Lymantria dispar, Macalla thyrisalis, Malacosoma sp., Mamestra brassicae, Mamestra configurata, Manduca quinquemaculata, Manduca sexta, Maruca testulalis, Melanchra picta, Operophtera brumata, Orgyia sp., Ostrinia nubilalis, Paleacrita vernata, Papilio cresphontes, Pectinophora gossypiella, Phryganidia californica, Phyllonorycter blancardella, Pieris napi, Pieris rapae, Plathypena scabra, Platynota flouendana, Platynota stultana, Platyptilia carduidactyla, Plodia interpunctella, Plutella xylostella, Pontia protodice, Pseudaletia unipuncta, Pseudoplasia includens, Sabulodes aegrotata, Schizura concinna, Sitotroga cerealella, Spilonta ocellana, Spodoptera sp., Thaurnstopoea pityocampa, Tinsola bisselliella, Trichoplusia hi, Udea rubigalis, Xylomyges curiails, and Yponomeuta padella.

[0067] Insect pests also include insects selected from the orders Diptera, Hymenoptera, Lepidoptera, Mallophaga, Homoptera, Hemiptera, Orthroptera, Thysanoptera, Dermaptera, Isoptera, Anoplura, Siphonaptera, Trichoptera, Coleoptera. Insect pests of the invention for the major crops include, but are not limited to: Maize: Ostrinia nubilalis, European corn borer; Agrotis ipsilon, black cutworm; Helicoverpa zeae, corn earworm; Spodoptera frugiperda, fall armyworm; Diatraea grandiosella, southwestern corn borer; Elasmopalpus lignosellus, lesser cornstalk borer; Diatraea saccharalis, surgarcane borer; western corn rootworm, e.g., Diabrotica virgifera virgifera; northern corn rootworm, e.g., Diabrotica longicornis barberi; southern corn rootworm, e.g., Diabrotica undecimpunctata howardi; Melanotus spp., wireworms; Cyclocephala borealis, northern masked chafer (white grub); Cyclocephala immaculata, southern masked chafer (white grub); Popillia japonica, Japanese beetle; Chaetocnema pulicaria, corn flea beetle; Sphenophorus maidis, maize billbug; Rhopalosiphum maidis, corn leaf aphid; Anuraphis maidiradicis, corn root aphid; Euschistus heros (Neotropical brown stink bug OR soy stink bug); Piezodorus guildinii (red-banded stink bug); Dichelops melacanthus (no common name); Dichelops furcatus (no common name); Blissus leucopterus leucopterus, chinch bug; Melanoplus femurrubrum, redlegged grasshopper; Melanoplus sanguinipes, migratory grasshopper; Hylemya platura, seedcorn maggot; Agromyza parvicornis, corn blotch leafminer; Anaphothrips obscrurus, grass thrips; Solenopsis milesta, thief ant; Tetranychus urticae, two spotted spider mite; Sorghum: Chilo partellus, sorghum borer; Spodoptera frugiperda, fall armyworm; Helicoverpa zea, corn earworm; Elasmopalpus lignosellus, lesser cornstalk borer; Feltia subterranea, granulate cutworm; Phyllophaga crinita, white grub; Eleodes, Conoderus, and Aeolus spp., wireworms; Oulema melanopus, cereal leaf beetle; Chaetocnema pulicaria, corn flea beetle; Sphenophorus maidis, maize billbug; Rhopalosiphum maidis; corn leaf aphid; Sipha flava, yellow sugarcane aphid; chinch bug, e.g., Blissus leucopterus leucopterus; Contarinia sorghicola, sorghum midge; Tetranychus cinnabarinus, carmine spider mite; Tetranychus urticae, two-spotted spider mite; Wheat: Pseudaletia unipunctata, army worm; Spodoptera frugiperda, fall armyworm; Elasmopalpus lignosellus, lesser cornstalk borer; Agrotis orthogonia, pale western cutworm; Elasmopalpus lignosellus, lesser cornstalk borer; Oulema melanopus, cereal leaf beetle; Hypera punctata, clover leaf weevil; southern corn rootworm, e.g., Diabrotica undecimpunctata howardi; Russian wheat aphid; Schizaphis graminum, greenbug; Macrosiphum avenae, English grain aphid; Melanoplus femurrubrum, redlegged grasshopper; Melanoplus differentialis, differential grasshopper; Melanoplus sanguinipes, migratory grasshopper; Mayetiola destructor, Hessian fly; Sitodiplosis mosellana, wheat midge; Meromyza americana, wheat stem maggot; Hylemya coarctata, wheat bulb fly; Frankliniella fusca, tobacco thrips; Cephus cinctus, wheat stem sawfly; Aceria tulipae, wheat curl mite; Sunflower: Cylindrocupturus adspersus, sunflower stem weevil; Smicronyx fulus, red sunflower seed weevil; Smicronyx sordidus, gray sunflower seed weevil; Suleima helianthana, sunflower bud moth; Homoeosoma electellum, sunflower moth; Zygogramma exclamationis, sunflower beetle; Bothyrus gibbosus, carrot beetle; Neolasioptera murtfeldtiana, sunflower seed midge; Cotton: Heliothis virescens, tobacco budworm; Helicoverpa zea, cotton bollworm; Spodoptera exigua, beet armyworm; Pectinophora gossypiella, pink bollworm; boll weevil, e.g., Anthonomus grandis; Aphis gossypii, cotton aphid; Pseudatomoscelis seriatus, cotton fleahopper; Trialeurodes abutilonea, bandedwinged whitefly; Lygus lineolaris, tarnished plant bug; Melanoplus femurrubrum, redlegged grasshopper; Melanoplus differentialis, differential grasshopper; Thrips tabaci, onion thrips; Franklinkiella fusca, tobacco thrips; Tetranychus cinnabarinus, carmine spider mite; Tetranychus urticae, two-spotted spider mite; Rice: Diatraea saccharalis, sugarcane borer; Spodoptera frugiperda, fall armyworm; Helicoverpa zea, corn earworm; Colaspis brunnea, grape colaspis; Lissorhoptrus oryzophilus, rice water weevil; Sitophilus oryzae, rice weevil; Nephotettix nigropictus, rice leafhoper; chinch bug, e.g., Blissus leucopterus leucopterus; Acrosternum hilare, green stink bug; Soybean: Pseudoplusia includens, soybean looper; Anticarsia gemmatalis, velvetbean caterpillar; Plathypena scabra, green cloverworm; Ostrinia nubilalis, European corn borer; Agrotis ipsilon, black cutworm; Spodoptera exigua, beet armyworm; Heliothis virescens, tobacco budworm; Helicoverpa zea, cotton bollworm; Epilachna varivestis, Mexican bean beetle; Myzus persicae, green peach aphid; Empoasca fabae, potato leafhopper; Acrosternum hilare, green stink bug; Melanoplus femurrubrum, redlegged grasshopper; Melanoplus differentialis, differential grasshopper; Hylemya platura, seedcorn maggot; Sericothrips variabilis, soybean thrips; Thrips tabaci, onion thrips; Tetranychus turkestani, strawberry spider mite; Tetranychus urticae, two-spotted spider mite; Barley: Ostrinia nubilalis, European corn borer; Agrotis ipsilon, black cutworm; Schizaphis graminum, greenbug; chinch bug, e.g., Blissus leucopterus leucopterus; Acrosternum hilare, green stink bug; Euschistus serous, brown stink bug; Jylemya platura, seedcorn maggot; Mayetiola destructor, Hessian fly; Petrobia latens, brown wheat mite; Oil Seed Rape: Vrevicoryne brassicae, cabbage aphid; Phyllotreta cruciferae, crucifer flea beetle; Phyllotreta striolata, striped flea beetle; Phyllotreta nemorum, striped turnip flea beetle; Meligethes aeneus, rapeseed beetle; and the pollen beetles Meligethes rufimanus, Meligethes nigrescens, Meligethes canadianus, and Meligethes viridescens; Potato: Leptinotarsa decemlineata, Colorado potato beetle.

[0068] The methods and compositions provided herein may be effective against Hemiptera such as Lygus hesperus, Lygus lineolaris, Lygus pratensis, Lygus rugulipennis Popp, Lygus pabulinus, Calocoris norvegicus, Orthops compestris, Plesiocoris rugicollis, Cyrtopeltis modestus, Cyrtopeltis notatus, Spanagonicus albofasciatus, Diaphnocoris chlorinonis, Labopidicola allii, Pseudatomoscelis seriatus, Adelphocoris rapidus, Poecilocapsus lineatus, Blissus leucopterus, Nysius ericae, Nysius raphanus, Euschistus servus, Nezara viridula, Eurygaster, Coreidae, Pyrrhocoridae, Tinidae, Blostomatidae, Reduviidae, and Cimicidae. Pests of interest also include Araecerus fasciculatus, coffee bean weevil; Acanthoscelides obtectus, bean weevil; Bruchus rufmanus, broadbean weevil; Bruchus pisorum, pea weevil; Zabrotes subfasciatus, Mexican bean weevil; Diabrotica balteata, banded cucumber beetle; Cerotoma trifurcata, bean leaf beetle; Diabrotica virgifera, Mexican corn rootworm; Epitrix cucumeris, potato flea beetle; Chaetocnema confinis, sweet potato flea beetle; Hypera postica, alfalfa weevil; Anthonomus quadrigibbus, apple curculio; Sternechus paludatus, bean stalk weevil; Hypera brunnipennis, Egyptian alfalfa weevil; Sitophilus granaries, granary weevil; Craponius inaequalis, grape curculio; Sitophilus zeamais, maize weevil; Conotrachelus nenuphar, plum curculio; Euscepes postfaciatus, West Indian sweet potato weevil; Maladera castanea, Asiatic garden beetle; Rhizotrogus majalis, European chafer; Macrodactylus subspinosus, rose chafer; Tribolium confusum, confused flour beetle; Tenebrio obscurus, dark mealworm; Tribolium castaneum, red flour beetle; Tenebrio molitor, yellow mealworm.

[0069] Nematodes include parasitic nematodes such as root-knot, cyst, and lesion nematodes, including Heterodera spp., Meloidogyne spp., and Globodera spp.; particularly members of the cyst nematodes, including, but not limited to, Heterodera glycines (soybean cyst nematode); Heterodera schachtii (beet cyst nematode); Heterodera avenae (cereal cyst nematode); and Globodera rostochiensis and Globodera pailida (potato cyst nematodes). Lesion nematodes include Pratylenchus spp.

[0070] Insect pests may be tested for pesticidal activity of compositions of the invention in early developmental stages, e.g., as larvae or other immature forms. The insects may be reared in total darkness at from about 20.degree. C. to about 30.degree. C. and from about 30% to about 70% relative humidity. Bioassays may be performed as described in Czapla and Lang (1990) J. Econ. Entomol. 83 (6): 2480-2485. See, also the experimental section herein.

### III. Expression Cassettes

[0071] Polynucleotides encoding the pesticidal proteins provided herein can be provided in expression cassettes for expression in an organism of interest. The cassette will include 5′ and 3′ regulatory sequences operably linked to a polynucleotide encoding a pesticidal polypeptide provided herein that allows for expression of the polynucleotide. The cassette may additionally contain at least one additional gene or genetic element to be cotransformed into the organism. Where additional genes or elements are included, the components are operably linked. Alternatively, the additional gene(s) or element(s) can be provided on multiple expression cassettes. Such an expression cassette is provided with a plurality of restriction sites and/or recombination sites for insertion of the polynucleotides to be under the transcriptional regulation of the regulatory regions. The expression cassette may additionally contain a selectable marker gene.

[0072] The expression cassette will include in the 5′-3′ direction of transcription, a transcriptional and translational initiation region (i.e., a promoter), a pesticidal polynucleotide of the invention, and a transcriptional and translational termination region (i.e., termination region) functional in the organism of interest, i.e., a plant or bacteria. The promoters of the invention are capable of directing or driving expression of a coding sequence in a host cell. The regulatory regions (i.e., promoters, transcriptional regulatory regions, and translational termination regions) may be endogenous or heterologous to the host cell or to each other. As used herein, “heterologous” in reference to a sequence is a sequence that originates from a foreign species, or, if from the same species, is substantially modified from its native form in composition and/or genomic locus by deliberate human intervention. As used herein, a chimeric gene comprises a coding sequence operably linked to a transcription initiation region that is heterologous to the coding sequence.

[0073] Convenient termination regions are available from the Ti-plasmid of A. tumefaciens, such as the octopine synthase and nopaline synthase termination regions. See also Guerineau et al. (1991) Mol. Gen. Genet. 262:141-144; Proudfoot (1991) Cell 64:671-674; Sanfacon et al. (1991) Genes Dev. 5:141-149; Mogen et al. (1990) Plant Cell 2:1261-1272; Munroe et al. (1990) Gene 91:151-158; Ballas et al. (1989) Nucleic Acids Res. 17:7891-7903; and Joshi et al. (1987) Nucleic Acids Res. 15:9627-9639.

[0074] Additional regulatory signals include, but are not limited to, transcriptional initiation start sites, operators, activators, enhancers, other regulatory elements, ribosomal binding sites, an initiation codon, termination signals, and the like. See, for example, U.S. Pat. Nos. 5,039,523 and 4,853,331; EPO 0480762A2; Sambrook et al. (1992) Molecular Cloning: A Laboratory Manual, ed. Maniatis et al. (Cold Spring Harbor Laboratory Press, Cold Spring Harbor, N.Y.), hereinafter “Sambrook 11”; Davis et al., eds. (1980) Advanced Bacterial Genetics (Cold Spring Harbor Laboratory Press), Cold Spring Harbor, N.Y., and the references cited therein.

[0075] In preparing the expression cassette, the various DNA fragments may be manipulated, so as to provide for the DNA sequences in the proper orientation and, as appropriate, in the proper reading frame. Toward this end, adapters or linkers may be employed to join the DNA fragments or other manipulations may be involved to provide for convenient restriction sites, removal of superfluous DNA, removal of restriction sites, or the like. For this purpose, in vitro mutagenesis, primer repair, restriction, annealing, resubstitutions, e.g., transitions and transversions, may be involved.

[0076] A number of promoters can be used in the practice of the invention. The promoters can be selected based on the desired outcome. The nucleic acids can be combined with constitutive, inducible, tissue-preferred, or other promoters for expression in the organism of interest. See, for example, promoters set forth in WO 99/43838 and in U.S. Pat. Nos. 8,575,425; 7,790,846; 8,147,856; 8,586832; 7,772,369; 7,534,939; 6,072,050; 5,659,026; 5,608,149; 5,608,144; 5,604,121; 5,569,597; 5,466,785; 5,399,680; 5,268,463; 5,608,142; and 6,177,611; herein incorporated by reference.

[0077] For expression in plants, constitutive promoters also include CaMV 35S promoter (Odell et al. (1985) Nature 313:810-812); rice actin (McElroy et al. (1990) Plant Cell 2:163-171); ubiquitin (Christensen et al. (1989) Plant Mol. Biol. 12:619-632 and Christensen et al. (1992) Plant Mol. Biol. 18:675-689); pEMU (Last et al. (1991) Theor. Appl. Genet. 81:581-588); MAS (Velten et al. (1984) EMBO J. 3:2723-2730). Inducible promoters include those that drive expression of pathogenesis-related proteins (PR proteins), which are induced following infection by a pathogen. See, for example, Redolfi et al. (1983) Neth. J. Plant Pathol. 89:245-254; Uknes et al. (1992) Plant Cell 4:645-656; and Van Loon (1985) Plant Mol. Virol. 4:111-116; and WO 99/43819, herein incorporated by reference. Promoters that are expressed locally at or near the site of pathogen infection may also be used (Marineau et al. (1987) Plant Mol. Biol. 9:335-342; Matton et al. (1989) Molecular Plant-Microbe Interactions 2:325-331; Somsisch et al. (1986) Proc. Natl. Acad. Sci. USA 83:2427-2430; Somsisch et al. (1988) Mol. Gen. Genet. 2:93-98; and Yang (1996) Proc. Natl. Acad. Sci. USA 93:14972-14977; Chen et al. (1996) Plant J. 10:955-966; Zhang et al. (1994) Proc. Natl. Acad. Sci. USA 91:2507-2511; Warner et al. (1993) Plant J. 3:191-201; Siebertz et al. (1989) Plant Cell 1:961-968; Cordero et al. (1992) Physiol. Mol. Plant Path. 41:189-200; U.S. Pat. No. 5,750,386 (nematode-inducible); and the references cited therein).

[0078] Wound-inducible promoters may be used in the constructions of the invention. Such wound-inducible promoters include pin II promoter (Ryan (1990) Ann. Rev. Phytopath. 28:425-449; Duan et al. (1996) Nature Biotechnology 14:494-498); wun1 and wun2 (U.S. Pat. No. 5,428,148); win1 and win2 (Stanford et al. (1989) Mol. Gen. Genet. 215:200-208); systemin (McGurl et al. (1992) Science 225:1570-1573); WIP1 (Rohmeier et al. (1993) Plant Mol. Biol. 22:783-792; Eckelkamp et al. (1993) FEBS Letters 323:73-76); MPI gene (Corderok et al. (1994) Plant J. 6(2):141-150); and the like, herein incorporated by reference.

[0079] Tissue-preferred promoters for use in the invention include those set forth in Yamamoto et al. (1997) Plant J. 12(2):255-265; Kawamata et al. (1997) Plant Cell Physiol. 38(7):792-803; Hansen et al. (1997) Mol. Gen Genet. 254(3):337-343; Russell et al. (1997) Transgenic Res. 6(2):157-168; Rinehart et al. (1996) Plant Physiol. 112(3):1331-1341; Van Camp et al. (1996) Plant Physiol. 112(2):525-535; Canevascini et al. (1996) Plant Physiol. 112(2):513-524; Yamamoto et al. (1994) Plant Cell Physiol. 35(5):773-778; Lam (1994) Results Probl. Cell Differ. 20:181-196; Orozco et al. (1993) Plant Mol Biol. 23(6):1129-1138; Matsuoka et al. (1993) Proc Natl. Acad. Sci. USA 90(20):9586-9590; and Guevara-Garcia et al. (1993) Plant J. 4(3):495-505.

[0080] Leaf-preferred promoters include those set forth in Yamamoto et al. (1997) Plant J. 12(2):255-265; Kwon et al. (1994) Plant Physiol. 105:357-67; Yamamoto et al. (1994) Plant Cell Physiol. 35(5):773-778; Gotor et al. (1993) Plant J. 3:509-18; Orozco et al. (1993) Plant Mol. Biol. 23(6):1129-1138; and Matsuoka et al. (1993) Proc. Natl. Acad. Sci. USA 90(20):9586-9590.

[0081] Root-preferred promoters are known and include those in Hire et al. (1992) Plant Mol. Biol. 20(2):207-218 (soybean root-specific glutamine synthetase gene); Keller and Baumgartner (1991) Plant Cell 3(10):1051-1061 (root-specific control element); Sanger et al. (1990) Plant Mol. Biol. 14(3):433-443 (mannopine synthase (MAS) gene of Agrobacterium tumefaciens); and Miao et al. (1991) Plant Cell 3(1):11-22 (cytosolic glutamine synthetase (GS)); Bogusz et al. (1990) Plant Cell 2(7):633-641; Leach and Aoyagi (1991) Plant Science (Limerick) 79(1):69-76 (rolC and rolD); Teeri et al. (1989) EMBO J. 8(2):343-350; Kuster et al. (1995) Plant Mol. Biol. 29(4):759-772 (the VfENOD-GRP3 gene promoter); and, Capana et al. (1994) Plant Mol. Biol. 25(4):681-691 (rolB promoter). See also U.S. Pat. Nos. 5,837,876; 5,750,386; 5,633,363; 5,459,252; 5,401,836; 5,110,732; and 5,023,179.

[0082] “Seed-preferred” promoters include both “seed-specific” promoters (those promoters active during seed development such as promoters of seed storage proteins) as well as “seed-germinating” promoters (those promoters active during seed germination). See Thompson et al. (1989) BioEssays 10:108. Seed-preferred promoters include, but are not limited to, Cim1 (cytokinin-induced message); cZ19B1 (maize 19 kDa zein); milps (myo-inositol-1-phosphate synthase) (see WO 00/11177 and U.S. Pat. No. 6,225,529). Gamma-zein is an endosperm-specific promoter. Globulin 1 (Glb-1) is a representative embryo-specific promoter. For dicots, seed-specific promoters include, but are not limited to, bean β-phaseolin, napin, β-conglycinin, soybean lectin, cruciferin, and the like. For monocots, seed-specific promoters include, but are not limited to, maize 15 kDa zein, 22 kDa zein, 27 kDa zein, gamma-zein, waxy, shrunken 1, shrunken 2, Globulin 1, etc. See also WO 00/12733, where seed-preferred promoters from end1 and end2 genes are disclosed.

[0083] For expression in a bacterial host, promoters that function in bacteria are well-known in the art. Such promoters include any of the known crystal protein gene promoters, including the promoters of any of the pesticidal proteins of the invention, and promoters specific for B. thuringiensis sigma factors. Alternatively, mutagenized or recombinant crystal protein-encoding gene promoters may be recombinantly engineered and used to promote expression of the novel gene segments disclosed herein.

[0084] The expression cassette can also comprise a selectable marker gene for the selection of transformed cells. Selectable marker genes are utilized for the selection of transformed cells or tissues. Marker genes include genes encoding antibiotic resistance, such as those encoding neomycin phosphotransferase II (NEO) and hygromycin phosphotransferase (HPT), as well as genes conferring resistance to herbicidal compounds, such as glufosinate ammonium, bromoxynil, imidazolinones, and 2,4-dichlorophenoxyacetate (2,4-D). Additional selectable markers are known and any can be used. See, for example, U.S. Provisional application 62/094,697, filed on Dec. 19, 2014, and U.S. Provisional Application 62/189,505, filed Jul. 7, 2015, both of which are herein incorporated by reference in their entirety, which discloses glufosinate resistance sequences that can be employed as selectable markers. See, for example, PCT/US2015/066648, filed on Dec. 18, 2015, herein incorporated by reference in its entirety, which discloses glufosinate resistance sequences that can be employed as selectable markers.

### IV. Methods, Host Cells and Plant Cells

[0085] As indicated, DNA constructs comprising nucleotide sequences encoding the pesticidal proteins or active variants or fragment thereof can be used to transform plants of interest or other organisms of interest. Methods for transformation involve introducing a nucleotide construct into a plant. By “introducing” is intended to introduce the nucleotide construct to the plant or other host cell in such a manner that the construct gains access to the interior of a cell of the plant or host cell. The methods of the invention do not require a particular method for introducing a nucleotide construct to a plant or host cell, only that the nucleotide construct gains access to the interior of at least one cell of the plant or the host organism. Methods for introducing nucleotide constructs into plants and other host cells are known in the art including, but not limited to, stable transformation methods, transient transformation methods, and virus-mediated methods.

[0086] The methods result in a transformed organisms, such as a plant, including whole plants, as well as plant organs (e.g., leaves, stems, roots, etc.), seeds, plant cells, propagules, embryos and progeny of the same. Plant cells can be differentiated or undifferentiated (e.g. callus, suspension culture cells, protoplasts, leaf cells, root cells, phloem cells, pollen).

[0087] “Transgenic plants” or “transformed plants” or “stably transformed” plants or cells or tissues refers to plants that have incorporated or integrated a polynucleotide encoding at least one pesticidal polypeptide of the invention. It is recognized that other exogenous or endogenous nucleic acid sequences or DNA fragments may also be incorporated into the plant cell. Agrobacterium- and biolistic-mediated transformation remain the two predominantly employed approaches. However, transformation may be performed by infection, transfection, microinjection, electroporation, microprojection, biolistics or particle bombardment, electroporation, silica/carbon fibers, ultrasound mediated, PEG mediated, calcium phosphate co-precipitation, polycation DMSO technique, DEAE dextran procedure, Agro and viral mediated (Caulimoriviruses, Geminiviruses, RNA plant viruses), liposome mediated and the like.

[0088] Transformation protocols as well as protocols for introducing polypeptides or polynucleotide sequences into plants may vary depending on the type of plant or plant cell, i.e., monocot or dicot, targeted for transformation. Methods for transformation are known in the art and include those set forth in U.S. Pat. Nos. 8,575,425; 7,692,068; 8,802,934; 7,541,517; each of which is herein incorporated by reference. See, also, Rakoczy-Trojanowska, M. (2002) Cell Mol Biol Lett. 7:849-858; Jones et al. (2005) Plant Methods 1:5; Rivera et al. (2012) Physics of Life Reviews 9:308-345; Bartlett et al. (2008) Plant Methods 4:1-12; Bates, G. W. (1999) Methods in Molecular Biology 111:359-366; Binns and Thomashow (1988) Annual Reviews in Microbiology 42:575-606; Christou, P. (1992) The Plant Journal 2:275-281; Christou, P. (1995) Euphytica 85:13-27; Tzfira et al. (2004) TRENDS in Genetics 20:375-383; Yao et al. (2006) Journal of Experimental Botany 57:3737-3746; Zupan and Zambryski (1995) Plant Physiology 107:1041-1047; Jones et al. (2005) Plant Methods 1:5;

[0089] Transformation may result in stable or transient incorporation of the nucleic acid into the cell. “Stable transformation” is intended to mean that the nucleotide construct introduced into a host cell integrates into the genome of the host cell and is capable of being inherited by the progeny thereof. “Transient transformation” is intended to mean that a polynucleotide is introduced into the host cell and does not integrate into the genome of the host cell.

[0090] Methods for transformation of chloroplasts are known in the art. See, for example, Svab et al. (1990) Proc. Nail. Acad. Sci. USA 87:8526-8530; Svab and Maliga (1993) Proc. Natl. Acad. Sci. USA 90:913-917; Svab and Maliga (1993) EMBO J. 12:601-606. The method relies on particle gun delivery of DNA containing a selectable marker and targeting of the DNA to the plastid genome through homologous recombination. Additionally, plastid transformation can be accomplished by transactivation of a silent plastid-borne transgene by tissue-preferred expression of a nuclear-encoded and plastid-directed RNA polymerase. Such a system has been reported in McBride et al. (1994) Proc. Natl. Acad. Sci. USA 91:7301-7305.

[0091] The cells that have been transformed may be grown into plants in accordance with conventional ways. See, for example, McCormick et al. (1986) Plant Cell Reports 5:81-84. These plants may then be grown, and either pollinated with the same transformed strain or different strains, and the resulting hybrid having constitutive expression of the desired phenotypic characteristic identified. Two or more generations may be grown to ensure that expression of the desired phenotypic characteristic is stably maintained and inherited and then seeds harvested to ensure expression of the desired phenotypic characteristic has been achieved. In this manner, the present invention provides transformed seed (also referred to as “transgenic seed”) having a nucleotide construct of the invention, for example, an expression cassette of the invention, stably incorporated into their genome.

[0092] In specific embodiments, the sequences provide herein can be targeted to specific cite within the genome of the host cell or plant cell. Such methods include, but are not limited to, meganucleases designed against the plant genomic sequence of interest (D'Halluin et al. 2013 Plant Biotechnol J); CRISPR-Cas9, TALENs, and other technologies for precise editing of genomes (Feng, et al. Cell Research 23:1229-1232, 2013, Podevin, et al. Trends Biotechnology, online publication, 2013, Wei et al., J Gen Genomics, 2013, Zhang et al (2013) WO 2013/026740); Cre-lox site-specific recombination (Dale et al. (1995) Plant J 7:649-659; Lyznik, et al. (2007) Transgenic Plant J 1:1-9; FLP-FRT recombination (Li et al. (2009) Plant Physiol 151:1087-1095); Bxb1-mediated integration (Yau et al. Plant J (2011) 701:147-166); zinc-finger mediated integration (Wright et al. (2005) Plant J 44:693-705); Cal et al. (2009) Plant Mol Biol 69:699-709); and homologous recombination (Lieberman-Lazarovich and Levy (2011) Methods Mol Biol 701: 51-65); Puchta (2002) Plant Mol Biol 48:173-182).

[0093] The sequence provided herein may be used for transformation of any plant species, including, but not limited to, monocots and dicots. Examples of plants of interest include, but are not limited to, corn (maize), sorghum, wheat, sunflower, tomato, crucifers, peppers, potato, cotton, rice, soybean, sugarbeet, sugarcane, tobacco, barley, and oilseed rape, Brassica sp., alfalfa, rye, millet, safflower, peanuts, sweet potato, cassaya, coffee, coconut, pineapple, citrus trees, cocoa, tea, banana, avocado, fig, guava, mango, olive, papaya, cashew, macadamia, almond, oats, vegetables, ornamentals, and conifers.

[0094] Vegetables include, but are not limited to, tomatoes, lettuce, green beans, lima beans, peas, and members of the genus Curcumis such as cucumber, cantaloupe, and musk melon. Ornamentals include, but are not limited to, azalea, hydrangea, hibiscus, roses, tulips, daffodils, petunias, carnation, poinsettia, and chrysanthemum. Preferably, plants of the present invention are crop plants (for example, maize, sorghum, wheat, sunflower, tomato, crucifers, peppers, potato, cotton, rice, soybean, sugarbeet, sugarcane, tobacco, barley, oilseed rape, etc.).

[0095] As used herein, the term plant includes plant cells, plant protoplasts, plant cell tissue cultures from which plants can be regenerated, plant calli, plant clumps, and plant cells that are intact in plants or parts of plants such as embryos, pollen, ovules, seeds, leaves, flowers, branches, fruit, kernels, ears, cobs, husks, stalks, roots, root tips, anthers, and the like. Grain is intended to mean the mature seed produced by commercial growers for purposes other than growing or reproducing the species. Progeny, variants, and mutants of the regenerated plants are also included within the scope of the invention, provided that these parts comprise the introduced polynucleotides. Further provided is a processed plant product or byproduct that retains the sequences disclosed herein, including for example, soymeal.

[0096] In another embodiment, the genes encoding the pesticidal proteins can be used to transform insect pathogenic organisms. Such organisms include baculoviruses, fungi, protozoa, bacteria, and nematodes. Microorganism hosts that are known to occupy the “phytosphere” (phylloplane, phyllosphere, rhizosphere, and/or rhizoplana) of one or more crops of interest may be selected. These microorganisms are selected so as to be capable of successfully competing in the particular environment with the wild-type microorganisms, provide for stable maintenance and expression of the gene expressing the pesticidal protein, and desirably, provide for improved protection of the pesticide from environmental degradation and inactivation.

[0097] Such microorganisms include archaea, bacteria, algae, and fungi. Of particular interest are microorganisms such as bacteria, e.g., Bacillus, Pseudomonas, Erwinia, Serratia, Klebsiella, Xanthomonas, Streptomyces, Rhizobium, Rhodopseudomonas, Methylius, Agrobacterium, Acetobacter, Lactobacillus, Arthrobacter, Azotobacter, Leuconostoc, and Alcaligenes. Fungi include yeast, e.g., Saccharomyces, Cryptococcus, Kluyveromyces, Sporobolomyces, Rhodotorula, and Aureobasidium. Of particular interest are such phytosphere bacterial species as Pseudomonas syringae, Pseudomonas aeruginosa, Pseudomonas fluorescens, Serratia marcescens, Acetobacter xylinum, Agrobacteria, Rhodopseudomonas spheroides, Xanthomonas campestris, Rhizobium melioti, Alcaligenes entrophus, Clavibacter xyli and Azotobacter vinlandir and phytosphere yeast species such as Rhodotorula rubra, R. glutinis, R. marina, R. aurantiaca, Cryptococcus albidus, C. diffluens, C. laurentii, Saccharomyces rosei, S. pretoriensis, S. cerevisiae, Sporobolomyces rosues, S. odorus, Kluyveromyces veronae, Aureobasidium pollulans, Bacillus thuringiensis, Escherichia coli, Bacillus subtilis, and the like.

[0098] Illustrative prokaryotes, both Gram-negative and gram-positive, include Enterobacteriaceae, such as Escherichia, Erwinia, Shigella, Salmonella, and Proteus; Bacillaceae; Rhizobiceae, such as Rhizobium; Spirillaceae, such as photobacterium, Zymomonas, Serratia, Aeromonas, Vibrio, Desulfovibrio, Spirillum; Lactobacillaceae; Pseudomonadaceae, such as Pseudomonas and Acetobacter; Azotobacteraceae and Nitrobacteraceae. Fungi include Phycomycetes and Ascomycetes, e.g., yeast, such as Saccharomyces and Schizosaccharomyces; and Basidiomycetes yeast, such as Rhodotorula, Aureobasidium, Sporobolomyces, and the like.

[0099] Genes encoding pesticidal proteins can be introduced by means of electrotransformation, PEG induced transformation, heat shock, transduction, conjugation, and the like. Specifically, genes encoding the pesticidal proteins can be cloned into a shuttle vector, for example, pHT3101 (Lerecius et al. (1989) FEMS Microbiol. Letts. 60: 211-218. The shuttle vector pHT3101 containing the coding sequence for the particular pesticidal protein gene can, for example, be transformed into the root-colonizing Bacillus by means of electroporation (Lerecius et al. (1989) FEMS Microbiol. Letts. 60: 211-218).

[0100] Expression systems can be designed so that pesticidal proteins are secreted outside the cytoplasm of gram-negative bacteria by fusing an appropriate signal peptide to the amino-terminal end of the pesticidal protein. Signal peptides recognized by E. coli include the OmpA protein (Ghrayeb et al. (1984) EMBO J, 3: 2437-2442).

[0101] Pesticidal proteins and active variants thereof can be fermented in a bacterial host and the resulting bacteria processed and used as a microbial spray in the same manner that Bacillus thuringiensis strains have been used as insecticidal sprays. In the case of a pesticidal protein(s) that is secreted from Bacillus, the secretion signal is removed or mutated using procedures known in the art. Such mutations and/or deletions prevent secretion of the pesticidal protein(s) into the growth medium during the fermentation process. The pesticidal proteins are retained within the cell, and the cells are then processed to yield the encapsulated pesticidal proteins.

[0102] Alternatively, the pesticidal proteins are produced by introducing heterologous genes into a cellular host. Expression of the heterologous gene results, directly or indirectly, in the intracellular production and maintenance of the pesticide. These cells are then treated under conditions that prolong the activity of the toxin produced in the cell when the cell is applied to the environment of target pest(s). The resulting product retains the toxicity of the toxin. These naturally encapsulated pesticidal proteins may then be formulated in accordance with conventional techniques for application to the environment hosting a target pest, e.g., soil, water, and foliage of plants. See, for example U.S. Pat. No. 6,468,523 and U.S. Publication No. 20050138685, and the references cited therein. In the present invention, a transformed microorganism (which includes whole organisms, cells, spore(s), pesticidal protein(s), pesticidal component(s), pest-impacting component(s), mutant(s), living or dead cells and cell components, including mixtures of living and dead cells and cell components, and including broken cells and cell components) or an isolated pesticidal protein can be formulated with an acceptable carrier into a pesticidal or agricultural composition(s) that is, for example, a suspension, a solution, an emulsion, a dusting powder, a dispersible granule, a wettable powder, and an emulsifiable concentrate, an aerosol, an impregnated granule, an adjuvant, a coatable paste, and also encapsulations in, for example, polymer substances.

[0103] Agricultural compositions may comprise a polypeptide, a recombinogenic polypeptide or a variant or fragment thereof, as disclosed herein. The agricultural composition disclosed herein may be applied to the environment of a plant or an area of cultivation, or applied to the plant, plant part, plant cell, or seed.

[0104] Such compositions disclosed above may be obtained by the addition of a surface-active agent, an inert carrier, a preservative, a humectant, a feeding stimulant, an attractant, an encapsulating agent, a binder, an emulsifier, a dye, a UV protectant, a buffer, a flow agent or fertilizers, micronutrient donors, or other preparations that influence plant growth. One or more agrochemicals including, but not limited to, herbicides, insecticides, fungicides, bactericides, nematicides, molluscicides, acaracides, plant growth regulators, harvest aids, and fertilizers, can be combined with carriers, surfactants or adjuvants customarily employed in the art of formulation or other components to facilitate product handling and application for particular target pests. Suitable carriers and adjuvants can be solid or liquid and correspond to the substances ordinarily employed in formulation technology, e.g., natural or regenerated mineral substances, solvents, dispersants, wetting agents, tackifiers, binders, or fertilizers. The active ingredients of the present invention are normally applied in the form of compositions and can be applied to the crop area, plant, or seed to be treated. For example, the compositions of the present invention may be applied to grain in preparation for or during storage in a grain bin or silo, etc. The compositions of the present invention may be applied simultaneously or in succession with other compounds. Methods of applying an active ingredient of the present invention or an agrochemical composition of the present invention that contains at least one of the pesticidal proteins produced by the bacterial strains of the present invention include, but are not limited to, foliar application, seed coating, and soil application. The number of applications and the rate of application depend on the intensity of infestation by the corresponding pest.

[0105] Suitable surface-active agents include, but are not limited to, anionic compounds such as a carboxylate of, for example, a metal; a carboxylate of a long chain fatty acid; an N-acylsarcosinate; mono or di-esters of phosphoric acid with fatty alcohol ethoxylates or salts of such esters; fatty alcohol sulfates such as sodium dodecyl sulfate, sodium octadecyl sulfate or sodium cetyl sulfate; ethoxylated fatty alcohol sulfates; ethoxylated alkylphenol sulfates; lignin sulfonates; petroleum sulfonates; alkyl aryl sulfonates such as alkyl-benzene sulfonates or lower alkylnaphtalene sulfonates, e.g., butyl-naphthalene sulfonate; salts of sulfonated naphthalene-formaldehyde condensates; salts of sulfonated phenol-formaldehyde condensates; more complex sulfonates such as the amide sulfonates, e.g., the sulfonated condensation product of oleic acid and N-methyl taurine; or the dialkyl sulfosuccinates, e.g., the sodium sulfonate of dioctyl succinate. Non-ionic agents include condensation products of fatty acid esters, fatty alcohols, fatty acid amides or fatty-alkyl- or alkenyl-substituted phenols with ethylene oxide, fatty esters of polyhydric alcohol ethers, e.g., sorbitan fatty acid esters, condensation products of such esters with ethylene oxide, e.g., polyoxyethylene sorbitar fatty acid esters, block copolymers of ethylene oxide and propylene oxide, acetylenic glycols such as 2,4,7,9-tetraethyl-5-decyn-4,7-diol, or ethoxylated acetylenic glycols. Examples of a cationic surface-active agent include, for instance, an aliphatic mono-, di-, or polyamine such as an acetate, naphthenate or oleate; or oxygen-containing amine such as an amine oxide of polyoxyethylene alkylamine; an amide-linked amine prepared by the condensation of a carboxylic acid with a di- or polyamine; or a quaternary ammonium salt.

[0106] Examples of inert materials include but are not limited to inorganic minerals such as kaolin, phyllosilicates, carbonates, sulfates, phosphates, or botanical materials such as cork, powdered corncobs, peanut hulls, rice hulls, and walnut shells.

[0107] The compositions of the present invention can be in a suitable form for direct application or as a concentrate of primary composition that requires dilution with a suitable quantity of water or other diluant before application. The pesticidal concentration will vary depending upon the nature of the particular formulation, specifically, whether it is a concentrate or to be used directly. The composition contains 1 to 98% of a solid or liquid inert carrier, and 0 to 50% or 0.1 to 50% of a surfactant. These compositions will be administered at the labeled rate for the commercial product, for example, about 0.01 lb-5.0 lb. per acre when in dry form and at about 0.01 pts.-10 pts. per acre when in liquid form.

[0108] In a further embodiment, the compositions, as well as the transformed microorganisms and pesticidal proteins, provided herein can be treated prior to formulation to prolong the pesticidal activity when applied to the environment of a target pest as long as the pretreatment is not deleterious to the pesticidal activity. Such treatment can be by chemical and/or physical means as long as the treatment does not deleteriously affect the properties of the composition(s). Examples of chemical reagents include but are not limited to halogenating agents; aldehydes such as formaldehyde and glutaraldehyde; anti-infectives, such as zephiran chloride; alcohols, such as isopropanol and ethanol; and histological fixatives, such as Bouin's fixative and Helly's fixative (see, for example, Humason (1967) Animal Tissue Techniques (W.H. Freeman and Co.).

[0109] In one aspect, pests may be killed or reduced in numbers in a given area by application of the pesticidal proteins provided herein to the area. Alternatively, the pesticidal proteins may be prophylactically applied to an environmental area to prevent infestation by a susceptible pest. Preferably the pest ingests, or is contacted with, a pesticidally-effective amount of the polypeptide. By “pesticidally-effective amount” is intended an amount of the pesticide that is able to bring about death to at least one pest, or to noticeably reduce pest growth, feeding, or normal physiological development. This amount will vary depending on such factors as, for example, the specific target pests to be controlled, the specific environment, location, plant, crop, or agricultural site to be treated, the environmental conditions, and the method, rate, concentration, stability, and quantity of application of the pesticidally-effective polypeptide composition. The formulations or compositions may also vary with respect to climatic conditions, environmental considerations, and/or frequency of application and/or severity of pest infestation.

[0110] The active ingredients are normally applied in the form of compositions and can be applied to the crop area, plant, or seed to be treated. Methods are therefore provided for providing to a plant, plant cell, seed, plant part or an area of cultivation, an effective amount of the agricultural composition comprising the polypeptide, recombinogenic polypeptide or an active variant or fragment thereof. By “effective amount” is intended an amount of a protein or composition has pesticidal activity that is sufficient to kill or control the pest or result in a noticeable reduction in pest growth, feeding, or normal physiological development. Such decreases in numbers, pest growth, feeding or normal development can comprise any statistically significant decrease, including, for example a decrease of about 5%, 10%, 15%, 20%, 25%, 30%, 35%, 40%, 45%, 50%, 55%, 60%, 65%, 70%, 75%, 85%, 90%, 95% or greater.

[0111] For example, the compositions may be applied to grain in preparation for or during storage in a grain bin or silo, etc. The compositions may be applied simultaneously or in succession with other compounds. Methods of applying an active ingredient or an agrochemical composition comprising at least one of the polypeptides, recombinogenic polypeptides or variants or fragments thereof as disclosed herein, include but are not limited to, foliar application, seed coating, and soil application.

[0112] Methods for increasing plant yield are provided. The methods comprise providing a plant or plant cell expressing a polynucleotide encoding the pesticidal polypeptide sequence disclosed herein and growing the plant or a seed thereof in a field infested with (or susceptible to infestation by) a pest against which said polypeptide has pesticidal activity. In some embodiments, the polypeptide has pesticidal activity against a lepidopteran, coleopteran, dipteran, hemipteran, or nematode pest, and said field is infested with a lepidopteran, hemipteran, coleopteran, dipteran, or nematode pest. As defined herein, the “yield” of the plant refers to the quality and/or quantity of biomass produced by the plant. By “biomass” is intended any measured plant product. An increase in biomass production is any improvement in the yield of the measured plant product. Increasing plant yield has several commercial applications. For example, increasing plant leaf biomass may increase the yield of leafy vegetables for human or animal consumption. Additionally, increasing leaf biomass can be used to increase production of plant-derived pharmaceutical or industrial products. An increase in yield can comprise any statistically significant increase including, but not limited to, at least a 1% increase, at least a 3% increase, at least a 5% increase, at least a 10% increase, at least a 20% increase, at least a 30%, at least a 50%, at least a 70%, at least a 100% or a greater increase in yield compared to a plant not expressing the pesticidal sequence. In specific methods, plant yield is increased as a result of improved pest resistance of a plant expressing a pesticidal protein disclosed herein. Expression of the pesticidal protein results in a reduced ability of a pest to infest or feed.

[0113] The plants can also be treated with one or more chemical compositions, including one or more herbicide, insecticides, or fungicides.

[0114] Non-Limiting Embodiments Include:

[0115] 1. An isolated polypeptide having insecticidal activity, comprising

[0116] (a) a polypeptide comprising an amino acid sequence selected from the group consisting of sequences set forth in SEQ ID NO: 1, 2, 3, 4, 5, 6, 7, 8, 9, 10, 11, 12, 13, 14, 15, 16, 17, 18, 19, 20, 21, 22, 23, 24, 25, 26, 27, 28, 29, 30, 31, 32, 33, 34, 35, 36, 37, 38, 39, 40, 41, 42, 43, 44, 45, 46, 47, 48, 49, 50, 51, 52, 53, 54, 55, 56, 57, 58, 59, 60, 61, 62, 63, 64, 65, 66, 67, 68, 69, 70, 71, 72, 73, 74, 75, 76, 77, 78, 79, 80, 81, 82, 83, 84, 85, 86, 87, 88, 89, 90, 91, 92, 93, 94, 95, 96, 97, 98, 99, 100, 101, 102, 103, 104, 105, 106, 107, 108, 109, 110, 111, 112, 113, 114, 115, 116, 117, 118, 119, 120, 121, 122, 123, 124, 125, 126, 127, 128, 129, 130, 131, 132, 133, 134, 135, 136, 137, 138, 139, 140, 141, 142, 143, 144, 145, 146, 147, 148, 149, 150, 151, 152, 153, 154, 155, 156, 157, 158, 159, 160, 161, 162, 163, 164, 165, 166, 167, 168, 169, 170, 171, 172, 173, 174, 175, 176, 177, 178, 179, 180, 181, 182, 183, 184, 185, 186, 187, 188, 189, 190, 191, 192, 193, 194, 195, 196, 197, 198, 199, 200, 201, 202, 203, 204, 205, 206, 207, 208, 209, 210, 211, 212, 213, 214, 215, 216, 217, 218, 219, 220, 221, 222, 223, 224, 225, 226, 227, 228, 229, 230, 231, 232, 233, 234, 235, 236, 237, 238, 239, 240, 241, 242, 243, 244, 245, 246, 247, 248, 249, 250, 251, 252, 253, 254, 255, 256, 257, 258, 259, 260, 261, 262, 263, 264, 265, 266, 267, 268, 269, 270, 271, 272, 273, 274, 275, 276, 277, 278, 279, 280, 281, 282, 283, 284, 285, 286, 287, 288, 289, 290, 291, 292, 293, 294, 295, 296, 297, 298, 299, 300, 301, 302, 303, 304, 305, 306, 307, 308, 309, 310, 311, 312, 313, 314, 315, 316, 317, 318, 319, 320, 321, 322, 323, 324, 325, 326, 327, 328, 329, 330, 331, 332, 333, 334, 335, 336, 337, 338, 339, 340, 341, 342, 343, 344, 345, 346, 347, 348, 349, 350, 351, 352, 353, 354, 355, 356, 357, 358, 359, 360, 361, 362, 363, 364, 365, 366, 367, 368, 369, 370, 371, 372, 373, 374, 375, 376, 377, 378, 379, 380, 381, 382, 383, 384, 385, 386, 387, 388, 389, 390, 391, 392, and 393; or

[0117] (b) a polypeptide comprising an amino acid sequence having at least the percent sequence identity set forth in Table 1 to an amino acid sequence selected from the group consisting of sequences set forth in SEQ ID NOs: 1, 2, 3, 4, 5, 6, 7, 8, 9, 10, 11, 12, 13, 14, 15, 16, 17, 18, 19, 20, 21, 22, 23, 24, 25, 26, 27, 28, 29, 30, 31, 32, 33, 34, 35, 36, 37, 38, 39, 40, 41, 42, 43, 44, 45, 46, 47, 48, 49, 50, 51, 52, 53, 54, 55, 56, 57, 58, 59, 60, 61, 62, 63, 64, 65, 66, 67, 68, 69, 70, 71, 72, 73, 74, 75, 76, 77, 78, 79, 80, 81, 82, 83, 84, 85, 86, 87, 88, 89, 90, 91, 92, 93, 94, 95, 96, 97, 98, 99, 100, 101, 102, 103, 104, 105, 106, 107, 108, 109, 110, 111, 112, 113, 114, 115, 116, 117, 118, 119, 120, 121, 122, 123, 124, 125, 126, 127, 128, 129, 130, 131, 132, 133, 134, 135, 136, 137, 138, 139, 140, 141, 142, 143, 144, 145, 146, 147, 148, 149, 150, 151, 152, 153, 154, 155, 156, 157, 158, 159, 160, 161, 162, 163, 164, 165, 166, 167, 168, 169, 170, 171, 172, 173, 174, 175, 176, 177, 178, 179, 180, 181, 182, 183, 184, 185, 186, 187, 188, 189, 190, 191, 192, 193, 194, 195, 196, 197, 198, 199, 200, 201, 202, 203, 204, 205, 206, 207, 208, 209, 210, 211, 212, 213, 214, 215, 216, 217, 218, 219, 220, 221, 222, 223, 224, 225, 226, 227, 228, 229, 230, 231, 232, 233, 234, 235, 236, 237, 238, 239, 240, 241, 242, 243, 244, 245, 246, 247, 248, 249, 250, 251, 252, 253, 254, 255, 256, 257, 258, 259, 260, 261, 262, 263, 264, 265, 266, 267, 268, 269, 270, 271, 272, 273, 274, 275, 276, 277, 278, 279, 280, 281, 282, 283, 284, 285, 286, 287, 288, 289, 290, 291, 292, 293, 294, 295, 296, 297, 298, 299, 300, 301, 302, 303, 304, 305, 306, 307, 308, 309, 310, 311, 312, 313, 314, 315, 316, 317, 318, 319, 320, 321, 322, 323, 324, 325, 326, 327, 328, 329, 330, 331, 332, 333, 334, 335, 336, 337, 338, 339, 340, 341, 342, 343, 344, 345, 346, 347, 348, 349, 350, 351, 352, 353, 354, 355, 356, 357, 358, 359, 360, 361, 362, 363, 364, 365, 366, 367, 368, 369, 370, 371, 372, 373, 374, 375, 376, 377, 378, 379, 380, 381, 382, 383, 384, 385, 386, 387, 388, 389, 390, 391, 392, and 393.

[0118] 2. The polypeptide of embodiment 1, wherein said polypeptide comprises the amino acid sequence set forth in SEQ ID NO: 1, 2, 3, 4, 5, 6, 7, 8, 9, 10, 11, 12, 13, 14, 15, 16, 17, 18, 19, 20, 21, 22, 23, 24, 25, 26, 27, 28, 29, 30, 31, 32, 33, 34, 35, 36, 37, 38, 39, 40, 41, 42, 43, 44, 45, 46, 47, 48, 49, 50, 51, 52, 53, 54, 55, 56, 57, 58, 59, 60, 61, 62, 63, 64, 65, 66, 67, 68, 69, 70, 71, 72, 73, 74, 75, 76, 77, 78, 79, 80, 81, 82, 83, 84, 85, 86, 87, 88, 89, 90, 91, 92, 93, 94, 95, 96, 97, 98, 99, 100, 101, 102, 103, 104, 105, 106, 107, 108, 109, 110, 111, 112, 113, 114, 115, 116, 117, 118, 119, 120, 121, 122, 123, 124, 125, 126, 127, 128, 129, 130, 131, 132, 133, 134, 135, 136, 137, 138, 139, 140, 141, 142, 143, 144, 145, 146, 147, 148, 149, 150, 151, 152, 153, 154, 155, 156, 157, 158, 159, 160, 161, 162, 163, 164, 165, 166, 167, 168, 169, 170, 171, 172, 173, 174, 175, 176, 177, 178, 179, 180, 181, 182, 183, 184, 185, 186, 187, 188, 189, 190, 191, 192, 193, 194, 195, 196, 197, 198, 199, 200, 201, 202, 203, 204, 205, 206, 207, 208, 209, 210, 211, 212, 213, 214, 215, 216, 217, 218, 219, 220, 221, 222, 223, 224, 225, 226, 227, 228, 229, 230, 231, 232, 233, 234, 235, 236, 237, 238, 239, 240, 241, 242, 243, 244, 245, 246, 247, 248, 249, 250, 251, 252, 253, 254, 255, 256, 257, 258, 259, 260, 261, 262, 263, 264, 265, 266, 267, 268, 269, 270, 271, 272, 273, 274, 275, 276, 277, 278, 279, 280, 281, 282, 283, 284, 285, 286, 287, 288, 289, 290, 291, 292, 293, 294, 295, 296, 297, 298, 299, 300, 301, 302, 303, 304, 305, 306, 307, 308, 309, 310, 311, 312, 313, 314, 315, 316, 317, 318, 319, 320, 321, 322, 323, 324, 325, 326, 327, 328, 329, 330, 331, 332, 333, 334, 335, 336, 337, 338, 339, 340, 341, 342, 343, 344, 345, 346, 347, 348, 349, 350, 351, 352, 353, 354, 355, 356, 357, 358, 359, 360, 361, 362, 363, 364, 365, 366, 367, 368, 369, 370, 371, 372, 373, 374, 375, 376, 377, 378, 379, 380, 381, 382, 383, 384, 385, 386, 387, 388, 389, 390, 391, 392, and/or 393.

[0119] 3. A composition comprising the polypeptide of embodiments 1 or 2.

[0120] 4. The polypeptide of embodiment 2, further comprising heterologous amino acid sequences.

[0121] 5. A recombinant nucleic acid molecule that encodes the polypeptide of embodiment 1, wherein said recombinant nucleic acid molecule is not the naturally occurring sequence encoding said polypeptide.

[0122] 6. The recombinant nucleic acid of embodiment 5, wherein said nucleic acid molecule is a synthetic sequence that has been designed for expression in a plant.

[0123] 7. The recombinant nucleic acid molecule of embodiment 6, wherein said nucleic acid molecule is operably linked to a promoter capable of directing expression in a plant cell.

[0124] 8. The recombinant nucleic acid molecule of embodiment 5, wherein said nucleic acid molecule is operably linked to a promoter capable of directing expression in a bacteria.

[0125] 9. A host cell that contains the recombinant nucleic acid molecule of embodiment 8.

[0126] 10. The host cell of embodiment 9, wherein said host cell is a bacterial host cell.

[0127] 11. A DNA construct comprising a promoter that drives expression in a plant cell operably linked to a recombinant nucleic acid molecule comprising

[0128] (a) a nucleotide sequence that encodes a polypeptide comprising the amino acid sequence of any one of SEQ ID NOs: 1, 2, 3, 4, 5, 6, 7, 8, 9, 10, 11, 12, 13, 14, 15, 16, 17, 18, 19, 20, 21, 22, 23, 24, 25, 26, 27, 28, 29, 30, 31, 32, 33, 34, 35, 36, 37, 38, 39, 40, 41, 42, 43, 44, 45, 46, 47, 48, 49, 50, 51, 52, 53, 54, 55, 56, 57, 58, 59, 60, 61, 62, 63, 64, 65, 66, 67, 68, 69, 70, 71, 72, 73, 74, 75, 76, 77, 78, 79, 80, 81, 82, 83, 84, 85, 86, 87, 88, 89, 90, 91, 92, 93, 94, 95, 96, 97, 98, 99, 100, 101, 102, 103, 104, 105, 106, 107, 108, 109, 110, 111, 112, 113, 114, 115, 116, 117, 118, 119, 120, 121, 122, 123, 124, 125, 126, 127, 128, 129, 130, 131, 132, 133, 134, 135, 136, 137, 138, 139, 140, 141, 142, 143, 144, 145, 146, 147, 148, 149, 150, 151, 152, 153, 154, 155, 156, 157, 158, 159, 160, 161, 162, 163, 164, 165, 166, 167, 168, 169, 170, 171, 172, 173, 174, 175, 176, 177, 178, 179, 180, 181, 182, 183, 184, 185, 186, 187, 188, 189, 190, 191, 192, 193, 194, 195, 196, 197, 198, 199, 200, 201, 202, 203, 204, 205, 206, 207, 208, 209, 210, 211, 212, 213, 214, 215, 216, 217, 218, 219, 220, 221, 222, 223, 224, 225, 226, 227, 228, 229, 230, 231, 232, 233, 234, 235, 236, 237, 238, 239, 240, 241, 242, 243, 244, 245, 246, 247, 248, 249, 250, 251, 252, 253, 254, 255, 256, 257, 258, 259, 260, 261, 262, 263, 264, 265, 266, 267, 268, 269, 270, 271, 272, 273, 274, 275, 276, 277, 278, 279, 280, 281, 282, 283, 284, 285, 286, 287, 288, 289, 290, 291, 292, 293, 294, 295, 296, 297, 298, 299, 300, 301, 302, 303, 304, 305, 306, 307, 308, 309, 310, 311, 312, 313, 314, 315, 316, 317, 318, 319, 320, 321, 322, 323, 324, 325, 326, 327, 328, 329, 330, 331, 332, 333, 334, 335, 336, 337, 338, 339, 340, 341, 342, 343, 344, 345, 346, 347, 348, 349, 350, 351, 352, 353, 354, 355, 356, 357, 358, 359, 360, 361, 362, 363, 364, 365, 366, 367, 368, 369, 370, 371, 372, 373, 374, 375, 376, 377, 378, 379, 380, 381, 382, 383, 384, 385, 386, 387, 388, 389, 390, 391, 392, and/or 393; or,

[0129] (b) a nucleotide sequence that encodes a polypeptide comprising an amino acid sequence having at least the percent sequence identity set forth in Table 1 to an amino acid sequence selected from the group consisting of sequences set forth in SEQ ID NOs: 1, 2, 3, 4, 5, 6, 7, 8, 9, 10, 11, 12, 13, 14, 15, 16, 17, 18, 19, 20, 21, 22, 23, 24, 25, 26, 27, 28, 29, 30, 31, 32, 33, 34, 35, 36, 37, 38, 39, 40, 41, 42, 43, 44, 45, 46, 47, 48, 49, 50, 51, 52, 53, 54, 55, 56, 57, 58, 59, 60, 61, 62, 63, 64, 65, 66, 67, 68, 69, 70, 71, 72, 73, 74, 75, 76, 77, 78, 79, 80, 81, 82, 83, 84, 85, 86, 87, 88, 89, 90, 91, 92, 93, 94, 95, 96, 97, 98, 99, 100, 101, 102, 103, 104, 105, 106, 107, 108, 109, 110, 111, 112, 113, 114, 115, 116, 117, 118, 119, 120, 121, 122, 123, 124, 125, 126, 127, 128, 129, 130, 131, 132, 133, 134, 135, 136, 137, 138, 139, 140, 141, 142, 143, 144, 145, 146, 147, 148, 149, 150, 151, 152, 153, 154, 155, 156, 157, 158, 159, 160, 161, 162, 163, 164, 165, 166, 167, 168, 169, 170, 171, 172, 173, 174, 175, 176, 177, 178, 179, 180, 181, 182, 183, 184, 185, 186, 187, 188, 189, 190, 191, 192, 193, 194, 195, 196, 197, 198, 199, 200, 201, 202, 203, 204, 205, 206, 207, 208, 209, 210, 211, 212, 213, 214, 215, 216, 217, 218, 219, 220, 221, 222, 223, 224, 225, 226, 227, 228, 229, 230, 231, 232, 233, 234, 235, 236, 237, 238, 239, 240, 241, 242, 243, 244, 245, 246, 247, 248, 249, 250, 251, 252, 253, 254, 255, 256, 257, 258, 259, 260, 261, 262, 263, 264, 265, 266, 267, 268, 269, 270, 271, 272, 273, 274, 275, 276, 277, 278, 279, 280, 281, 282, 283, 284, 285, 286, 287, 288, 289, 290, 291, 292, 293, 294, 295, 296, 297, 298, 299, 300, 301, 302, 303, 304, 305, 306, 307, 308, 309, 310, 311, 312, 313, 314, 315, 316, 317, 318, 319, 320, 321, 322, 323, 324, 325, 326, 327, 328, 329, 330, 331, 332, 333, 334, 335, 336, 337, 338, 339, 340, 341, 342, 343, 344, 345, 346, 347, 348, 349, 350, 351, 352, 353, 354, 355, 356, 357, 358, 359, 360, 361, 362, 363, 364, 365, 366, 367, 368, 369, 370, 371, 372, 373, 374, 375, 376, 377, 378, 379, 380, 381, 382, 383, 384, 385, 386, 387, 388, 389, 390, 391, 392, and 393.

[0130] 12. The DNA construct of embodiment 11, wherein said nucleotide sequence is a synthetic DNA sequence that has been designed for expression in a plant.

[0131] 13. A vector comprising the DNA construct of embodiment 11.

[0132] 14. A host cell that contains the DNA construct of any one of embodiments 11-13.

[0133] 15. The host cell of embodiment 14, wherein the host cell is a plant cell.

[0134] 16. A transgenic plant comprising the host cell of embodiment 15.

[0135] 17. A composition comprising the host cell of embodiment 10.

[0136] 18. The composition of embodiment 17, wherein said composition is selected from the group consisting of a powder, dust, pellet, granule, spray, emulsion, colloid, and solution.

[0137] 19. The composition of embodiment 17, wherein said composition comprises from about 1% to about 99% by weight of said polypeptide.

[0138] 20. A method for controlling a pest population comprising contacting said population with a pesticidal-effective amount of the composition of embodiment 17.

[0139] 21. A method for killing a pest population comprising contacting said population with a pesticidal-effective amount of the composition of embodiment 17.

[0140] 22. A method for producing a polypeptide with pesticidal activity, comprising culturing the host cell of embodiment 9 under conditions in which the nucleic acid molecule encoding the polypeptide is expressed.

[0141] 23. A plant having stably incorporated into its genome a DNA construct comprising a nucleotide sequence that encodes a protein having pesticidal activity, wherein said nucleotide sequence comprise

[0142] (a) a nucleotide sequence that encodes a polypeptide comprising the amino acid sequence of any one of SEQ ID NOs: 1, 2, 3, 4, 5, 6, 7, 8, 9, 10, 11, 12, 13, 14, 15, 16, 17, 18, 19, 20, 21, 22, 23, 24, 25, 26, 27, 28, 29, 30, 31, 32, 33, 34, 35, 36, 37, 38, 39, 40, 41, 42, 43, 44, 45, 46, 47, 48, 49, 50, 51, 52, 53, 54, 55, 56, 57, 58, 59, 60, 61, 62, 63, 64, 65, 66, 67, 68, 69, 70, 71, 72, 73, 74, 75, 76, 77, 78, 79, 80, 81, 82, 83, 84, 85, 86, 87, 88, 89, 90, 91, 92, 93, 94, 95, 96, 97, 98, 99, 100, 101, 102, 103, 104, 105, 106, 107, 108, 109, 110, 111, 112, 113, 114, 115, 116, 117, 118, 119, 120, 121, 122, 123, 124, 125, 126, 127, 128, 129, 130, 131, 132, 133, 134, 135, 136, 137, 138, 139, 140, 141, 142, 143, 144, 145, 146, 147, 148, 149, 150, 151, 152, 153, 154, 155, 156, 157, 158, 159, 160, 161, 162, 163, 164, 165, 166, 167, 168, 169, 170, 171, 172, 173, 174, 175, 176, 177, 178, 179, 180, 181, 182, 183, 184, 185, 186, 187, 188, 189, 190, 191, 192, 193, 194, 195, 196, 197, 198, 199, 200, 201, 202, 203, 204, 205, 206, 207, 208, 209, 210, 211, 212, 213, 214, 215, 216, 217, 218, 219, 220, 221, 222, 223, 224, 225, 226, 227, 228, 229, 230, 231, 232, 233, 234, 235, 236, 237, 238, 239, 240, 241, 242, 243, 244, 245, 246, 247, 248, 249, 250, 251, 252, 253, 254, 255, 256, 257, 258, 259, 260, 261, 262, 263, 264, 265, 266, 267, 268, 269, 270, 271, 272, 273, 274, 275, 276, 277, 278, 279, 280, 281, 282, 283, 284, 285, 286, 287, 288, 289, 290, 291, 292, 293, 294, 295, 296, 297, 298, 299, 300, 301, 302, 303, 304, 305, 306, 307, 308, 309, 310, 311, 312, 313, 314, 315, 316, 317, 318, 319, 320, 321, 322, 323, 324, 325, 326, 327, 328, 329, 330, 331, 332, 333, 334, 335, 336, 337, 338, 339, 340, 341, 342, 343, 344, 345, 346, 347, 348, 349, 350, 351, 352, 353, 354, 355, 356, 357, 358, 359, 360, 361, 362, 363, 364, 365, 366, 367, 368, 369, 370, 371, 372, 373, 374, 375, 376, 377, 378, 379, 380, 381, 382, 383, 384, 385, 386, 387, 388, 389, 390, 391, 392, and/or 393; or,

[0143] (b) a nucleotide sequence that encodes a polypeptide comprising an amino acid sequence having at least the percent sequence identity set forth in Table 1 to an amino acid sequence selected from the group consisting of sequences set forth in SEQ ID NOs: 1, 2, 3, 4, 5, 6, 7, 8, 9, 10, 11, 12, 13, 14, 15, 16, 17, 18, 19, 20, 21, 22, 23, 24, 25, 26, 27, 28, 29, 30, 31, 32, 33, 34, 35, 36, 37, 38, 39, 40, 41, 42, 43, 44, 45, 46, 47, 48, 49, 50, 51, 52, 53, 54, 55, 56, 57, 58, 59, 60, 61, 62, 63, 64, 65, 66, 67, 68, 69, 70, 71, 72, 73, 74, 75, 76, 77, 78, 79, 80, 81, 82, 83, 84, 85, 86, 87, 88, 89, 90, 91, 92, 93, 94, 95, 96, 97, 98, 99, 100, 101, 102, 103, 104, 105, 106, 107, 108, 109, 110, 111, 112, 113, 114, 115, 116, 117, 118, 119, 120, 121, 122, 123, 124, 125, 126, 127, 128, 129, 130, 131, 132, 133, 134, 135, 136, 137, 138, 139, 140, 141, 142, 143, 144, 145, 146, 147, 148, 149, 150, 151, 152, 153, 154, 155, 156, 157, 158, 159, 160, 161, 162, 163, 164, 165, 166, 167, 168, 169, 170, 171, 172, 173, 174, 175, 176, 177, 178, 179, 180, 181, 182, 183, 184, 185, 186, 187, 188, 189, 190, 191, 192, 193, 194, 195, 196, 197, 198, 199, 200, 201, 202, 203, 204, 205, 206, 207, 208, 209, 210, 211, 212, 213, 214, 215, 216, 217, 218, 219, 220, 221, 222, 223, 224, 225, 226, 227, 228, 229, 230, 231, 232, 233, 234, 235, 236, 237, 238, 239, 240, 241, 242, 243, 244, 245, 246, 247, 248, 249, 250, 251, 252, 253, 254, 255, 256, 257, 258, 259, 260, 261, 262, 263, 264, 265, 266, 267, 268, 269, 270, 271, 272, 273, 274, 275, 276, 277, 278, 279, 280, 281, 282, 283, 284, 285, 286, 287, 288, 289, 290, 291, 292, 293, 294, 295, 296, 297, 298, 299, 300, 301, 302, 303, 304, 305, 306, 307, 308, 309, 310, 311, 312, 313, 314, 315, 316, 317, 318, 319, 320, 321, 322, 323, 324, 325, 326, 327, 328, 329, 330, 331, 332, 333, 334, 335, 336, 337, 338, 339, 340, 341, 342, 343, 344, 345, 346, 347, 348, 349, 350, 351, 352, 353, 354, 355, 356, 357, 358, 359, 360, 361, 362, 363, 364, 365, 366, 367, 368, 369, 370, 371, 372, 373, 374, 375, 376, 377, 378, 379, 380, 381, 382, 383, 384, 385, 386, 387, 388, 389, 390, 391, 392, and 393.

[0144] 24. A transgenic seed of the plant of embodiment 23.

[0145] 25. A method for protecting a plant from an insect pest, comprising expressing in a plant or cell thereof a nucleotide sequence that encodes a pesticidal polypeptide, wherein said nucleotide sequence comprising

[0146] (a) a nucleotide sequence that encodes a polypeptide comprising the amino acid sequence of any one of SEQ ID NOs: 1, 2, 3, 4, 5, 6, 7, 8, 9, 10, 11, 12, 13, 14, 15, 16, 17, 18, 19, 20, 21, 22, 23, 24, 25, 26, 27, 28, 29, 30, 31, 32, 33, 34, 35, 36, 37, 38, 39, 40, 41, 42, 43, 44, 45, 46, 47, 48, 49, 50, 51, 52, 53, 54, 55, 56, 57, 58, 59, 60, 61, 62, 63, 64, 65, 66, 67, 68, 69, 70, 71, 72, 73, 74, 75, 76, 77, 78, 79, 80, 81, 82, 83, 84, 85, 86, 87, 88, 89, 90, 91, 92, 93, 94, 95, 96, 97, 98, 99, 100, 101, 102, 103, 104, 105, 106, 107, 108, 109, 110, 111, 112, 113, 114, 115, 116, 117, 118, 119, 120, 121, 122, 123, 124, 125, 126, 127, 128, 129, 130, 131, 132, 133, 134, 135, 136, 137, 138, 139, 140, 141, 142, 143, 144, 145, 146, 147, 148, 149, 150, 151, 152, 153, 154, 155, 156, 157, 158, 159, 160, 161, 162, 163, 164, 165, 166, 167, 168, 169, 170, 171, 172, 173, 174, 175, 176, 177, 178, 179, 180, 181, 182, 183, 184, 185, 186, 187, 188, 189, 190, 191, 192, 193, 194, 195, 196, 197, 198, 199, 200, 201, 202, 203, 204, 205, 206, 207, 208, 209, 210, 211, 212, 213, 214, 215, 216, 217, 218, 219, 220, 221, 222, 223, 224, 225, 226, 227, 228, 229, 230, 231, 232, 233, 234, 235, 236, 237, 238, 239, 240, 241, 242, 243, 244, 245, 246, 247, 248, 249, 250, 251, 252, 253, 254, 255, 256, 257, 258, 259, 260, 261, 262, 263, 264, 265, 266, 267, 268, 269, 270, 271, 272, 273, 274, 275, 276, 277, 278, 279, 280, 281, 282, 283, 284, 285, 286, 287, 288, 289, 290, 291, 292, 293, 294, 295, 296, 297, 298, 299, 300, 301, 302, 303, 304, 305, 306, 307, 308, 309, 310, 311, 312, 313, 314, 315, 316, 317, 318, 319, 320, 321, 322, 323, 324, 325, 326, 327, 328, 329, 330, 331, 332, 333, 334, 335, 336, 337, 338, 339, 340, 341, 342, 343, 344, 345, 346, 347, 348, 349, 350, 351, 352, 353, 354, 355, 356, 357, 358, 359, 360, 361, 362, 363, 364, 365, 366, 367, 368, 369, 370, 371, 372, 373, 374, 375, 376, 377, 378, 379, 380, 381, 382, 383, 384, 385, 386, 387, 388, 389, 390, 391, 392, and/or 393; or,

[0147] (b) a nucleotide sequence that encodes a polypeptide comprising an amino acid sequence having at least the percent sequence identity set forth in Table 1 to an amino acid sequence selected from the group consisting of sequences set forth in SEQ ID NOs: 1, 2, 3, 4, 5, 6, 7, 8, 9, 10, 11, 12, 13, 14, 15, 16, 17, 18, 19, 20, 21, 22, 23, 24, 25, 26, 27, 28, 29, 30, 31, 32, 33, 34, 35, 36, 37, 38, 39, 40, 41, 42, 43, 44, 45, 46, 47, 48, 49, 50, 51, 52, 53, 54, 55, 56, 57, 58, 59, 60, 61, 62, 63, 64, 65, 66, 67, 68, 69, 70, 71, 72, 73, 74, 75, 76, 77, 78, 79, 80, 81, 82, 83, 84, 85, 86, 87, 88, 89, 90, 91, 92, 93, 94, 95, 96, 97, 98, 99, 100, 101, 102, 103, 104, 105, 106, 107, 108, 109, 110, 111, 112, 113, 114, 115, 116, 117, 118, 119, 120, 121, 122, 123, 124, 125, 126, 127, 128, 129, 130, 131, 132, 133, 134, 135, 136, 137, 138, 139, 140, 141, 142, 143, 144, 145, 146, 147, 148, 149, 150, 151, 152, 153, 154, 155, 156, 157, 158, 159, 160, 161, 162, 163, 164, 165, 166, 167, 168, 169, 170, 171, 172, 173, 174, 175, 176, 177, 178, 179, 180, 181, 182, 183, 184, 185, 186, 187, 188, 189, 190, 191, 192, 193, 194, 195, 196, 197, 198, 199, 200, 201, 202, 203, 204, 205, 206, 207, 208, 209, 210, 211, 212, 213, 214, 215, 216, 217, 218, 219, 220, 221, 222, 223, 224, 225, 226, 227, 228, 229, 230, 231, 232, 233, 234, 235, 236, 237, 238, 239, 240, 241, 242, 243, 244, 245, 246, 247, 248, 249, 250, 251, 252, 253, 254, 255, 256, 257, 258, 259, 260, 261, 262, 263, 264, 265, 266, 267, 268, 269, 270, 271, 272, 273, 274, 275, 276, 277, 278, 279, 280, 281, 282, 283, 284, 285, 286, 287, 288, 289, 290, 291, 292, 293, 294, 295, 296, 297, 298, 299, 300, 301, 302, 303, 304, 305, 306, 307, 308, 309, 310, 311, 312, 313, 314, 315, 316, 317, 318, 319, 320, 321, 322, 323, 324, 325, 326, 327, 328, 329, 330, 331, 332, 333, 334, 335, 336, 337, 338, 339, 340, 341, 342, 343, 344, 345, 346, 347, 348, 349, 350, 351, 352, 353, 354, 355, 356, 357, 358, 359, 360, 361, 362, 363, 364, 365, 366, 367, 368, 369, 370, 371, 372, 373, 374, 375, 376, 377, 378, 379, 380, 381, 382, 383, 384, 385, 386, 387, 388, 389, 390, 391, 392, and 393.

[0148] 26. The method of embodiment 25, wherein said plant produces a pesticidal polypeptide having pesticidal against a lepidopteran or coleopteran pest.

[0149] 27. A method for increasing yield in a plant comprising growing in a field a plant or seed thereof having stably incorporated into its genome a DNA construct comprising a promoter that drives expression in a plant operably linked to a nucleotide sequence that encodes a pesticidal polypeptide, wherein said nucleotide sequence comprises

[0150] (a) a nucleotide sequence that encodes a polypeptide comprising the amino acid sequence of any one of SEQ ID NOs: 1, 2, 3, 4, 5, 6, 7, 8, 9, 10, 11, 12, 13, 14, 15, 16, 17, 18, 19, 20, 21, 22, 23, 24, 25, 26, 27, 28, 29, 30, 31, 32, 33, 34, 35, 36, 37, 38, 39, 40, 41, 42, 43, 44, 45, 46, 47, 48, 49, 50, 51, 52, 53, 54, 55, 56, 57, 58, 59, 60, 61, 62, 63, 64, 65, 66, 67, 68, 69, 70, 71, 72, 73, 74, 75, 76, 77, 78, 79, 80, 81, 82, 83, 84, 85, 86, 87, 88, 89, 90, 91, 92, 93, 94, 95, 96, 97, 98, 99, 100, 101, 102, 103, 104, 105, 106, 107, 108, 109, 110, 111, 112, 113, 114, 115, 116, 117, 118, 119, 120, 121, 122, 123, 124, 125, 126, 127, 128, 129, 130, 131, 132, 133, 134, 135, 136, 137, 138, 139, 140, 141, 142, 143, 144, 145, 146, 147, 148, 149, 150, 151, 152, 153, 154, 155, 156, 157, 158, 159, 160, 161, 162, 163, 164, 165, 166, 167, 168, 169, 170, 171, 172, 173, 174, 175, 176, 177, 178, 179, 180, 181, 182, 183, 184, 185, 186, 187, 188, 189, 190, 191, 192, 193, 194, 195, 196, 197, 198, 199, 200, 201, 202, 203, 204, 205, 206, 207, 208, 209, 210, 211, 212, 213, 214, 215, 216, 217, 218, 219, 220, 221, 222, 223, 224, 225, 226, 227, 228, 229, 230, 231, 232, 233, 234, 235, 236, 237, 238, 239, 240, 241, 242, 243, 244, 245, 246, 247, 248, 249, 250, 251, 252, 253, 254, 255, 256, 257, 258, 259, 260, 261, 262, 263, 264, 265, 266, 267, 268, 269, 270, 271, 272, 273, 274, 275, 276, 277, 278, 279, 280, 281, 282, 283, 284, 285, 286, 287, 288, 289, 290, 291, 292, 293, 294, 295, 296, 297, 298, 299, 300, 301, 302, 303, 304, 305, 306, 307, 308, 309, 310, 311, 312, 313, 314, 315, 316, 317, 318, 319, 320, 321, 322, 323, 324, 325, 326, 327, 328, 329, 330, 331, 332, 333, 334, 335, 336, 337, 338, 339, 340, 341, 342, 343, 344, 345, 346, 347, 348, 349, 350, 351, 352, 353, 354, 355, 356, 357, 358, 359, 360, 361, 362, 363, 364, 365, 366, 367, 368, 369, 370, 371, 372, 373, 374, 375, 376, 377, 378, 379, 380, 381, 382, 383, 384, 385, 386, 387, 388, 389, 390, 391, 392, and/or 393; or,

[0151] (b) a nucleotide sequence that encodes a polypeptide comprising an amino acid sequence having at least the percent sequence identity set forth in Table 1 to an amino acid sequence selected from the group consisting of sequences set forth in SEQ ID NOs: 1, 2, 3, 4, 5, 6, 7, 8, 9, 10, 11, 12, 13, 14, 15, 16, 17, 18, 19, 20, 21, 22, 23, 24, 25, 26, 27, 28, 29, 30, 31, 32, 33, 34, 35, 36, 37, 38, 39, 40, 41, 42, 43, 44, 45, 46, 47, 48, 49, 50, 51, 52, 53, 54, 55, 56, 57, 58, 59, 60, 61, 62, 63, 64, 65, 66, 67, 68, 69, 70, 71, 72, 73, 74, 75, 76, 77, 78, 79, 80, 81, 82, 83, 84, 85, 86, 87, 88, 89, 90, 91, 92, 93, 94, 95, 96, 97, 98, 99, 100, 101, 102, 103, 104, 105, 106, 107, 108, 109, 110, 111, 112, 113, 114, 115, 116, 117, 118, 119, 120, 121, 122, 123, 124, 125, 126, 127, 128, 129, 130, 131, 132, 133, 134, 135, 136, 137, 138, 139, 140, 141, 142, 143, 144, 145, 146, 147, 148, 149, 150, 151, 152, 153, 154, 155, 156, 157, 158, 159, 160, 161, 162, 163, 164, 165, 166, 167, 168, 169, 170, 171, 172, 173, 174, 175, 176, 177, 178, 179, 180, 181, 182, 183, 184, 185, 186, 187, 188, 189, 190, 191, 192, 193, 194, 195, 196, 197, 198, 199, 200, 201, 202, 203, 204, 205, 206, 207, 208, 209, 210, 211, 212, 213, 214, 215, 216, 217, 218, 219, 220, 221, 222, 223, 224, 225, 226, 227, 228, 229, 230, 231, 232, 233, 234, 235, 236, 237, 238, 239, 240, 241, 242, 243, 244, 245, 246, 247, 248, 249, 250, 251, 252, 253, 254, 255, 256, 257, 258, 259, 260, 261, 262, 263, 264, 265, 266, 267, 268, 269, 270, 271, 272, 273, 274, 275, 276, 277, 278, 279, 280, 281, 282, 283, 284, 285, 286, 287, 288, 289, 290, 291, 292, 293, 294, 295, 296, 297, 298, 299, 300, 301, 302, 303, 304, 305, 306, 307, 308, 309, 310, 311, 312, 313, 314, 315, 316, 317, 318, 319, 320, 321, 322, 323, 324, 325, 326, 327, 328, 329, 330, 331, 332, 333, 334, 335, 336, 337, 338, 339, 340, 341, 342, 343, 344, 345, 346, 347, 348, 349, 350, 351, 352, 353, 354, 355, 356, 357, 358, 359, 360, 361, 362, 363, 364, 365, 366, 367, 368, 369, 370, 371, 372, 373, 374, 375, 376, 377, 378, 379, 380, 381, 382, 383, 384, 385, 386, 387, 388, 389, 390, 391, 392, and 393.

[0152] 28. A method of obtaining a polynucleotide that encodes an improved polypeptide comprising pesticidal activity is provided, wherein the improved polypeptide has at least one improved property over any one of SEQ ID NOS: 1, 2, 3, 4, 5, 6, 7, 8, 9, 10, 11, 12, 13, 14, 15, 16, 17, 18, 19, 20, 21, 22, 23, 24, 25, 26, 27, 28, 29, 30, 31, 32, 33, 34, 35, 36, 37, 38, 39, 40, 41, 42, 43, 44, 45, 46, 47, 48, 49, 50, 51, 52, 53, 54, 55, 56, 57, 58, 59, 60, 61, 62, 63, 64, 65, 66, 67, 68, 69, 70, 71, 72, 73, 74, 75, 76, 77, 78, 79, 80, 81, 82, 83, 84, 85, 86, 87, 88, 89, 90, 91, 92, 93, 94, 95, 96, 97, 98, 99, 100, 101, 102, 103, 104, 105, 106, 107, 108, 109, 110, 111, 112, 113, 114, 115, 116, 117, 118, 119, 120, 121, 122, 123, 124, 125, 126, 127, 128, 129, 130, 131, 132, 133, 134, 135, 136, 137, 138, 139, 140, 141, 142, 143, 144, 145, 146, 147, 148, 149, 150, 151, 152, 153, 154, 155, 156, 157, 158, 159, 160, 161, 162, 163, 164, 165, 166, 167, 168, 169, 170, 171, 172, 173, 174, 175, 176, 177, 178, 179, 180, 181, 182, 183, 184, 185, 186, 187, 188, 189, 190, 191, 192, 193, 194, 195, 196, 197, 198, 199, 200, 201, 202, 203, 204, 205, 206, 207, 208, 209, 210, 211, 212, 213, 214, 215, 216, 217, 218, 219, 220, 221, 222, 223, 224, 225, 226, 227, 228, 229, 230, 231, 232, 233, 234, 235, 236, 237, 238, 239, 240, 241, 242, 243, 244, 245, 246, 247, 248, 249, 250, 251, 252, 253, 254, 255, 256, 257, 258, 259, 260, 261, 262, 263, 264, 265, 266, 267, 268, 269, 270, 271, 272, 273, 274, 275, 276, 277, 278, 279, 280, 281, 282, 283, 284, 285, 286, 287, 288, 289, 290, 291, 292, 293, 294, 295, 296, 297, 298, 299, 300, 301, 302, 303, 304, 305, 306, 307, 308, 309, 310, 311, 312, 313, 314, 315, 316, 317, 318, 319, 320, 321, 322, 323, 324, 325, 326, 327, 328, 329, 330, 331, 332, 333, 334, 335, 336, 337, 338, 339, 340, 341, 342, 343, 344, 345, 346, 347, 348, 349, 350, 351, 352, 353, 354, 355, 356, 357, 358, 359, 360, 361, 362, 363, 364, 365, 366, 367, 368, 369, 370, 371, 372, 373, 374, 375, 376, 377, 378, 379, 380, 381, 382, 383, 384, 385, 386, 387, 388, 389, 390, 391, 392, and/or 393 comprising:

[0153] (a) recombining a plurality of parental polynucleotides comprising SEQ ID NO: 1, 2, 3, 4, 5, 6, 7, 8, 9, 10, 11, 12, 13, 14, 15, 16, 17, 18, 19, 20, 21, 22, 23, 24, 25, 26, 27, 28, 29, 30, 31, 32, 33, 34, 35, 36, 37, 38, 39, 40, 41, 42, 43, 44, 45, 46, 47, 48, 49, 50, 51, 52, 53, 54, 55, 56, 57, 58, 59, 60, 61, 62, 63, 64, 65, 66, 67, 68, 69, 70, 71, 72, 73, 74, 75, 76, 77, 78, 79, 80, 81, 82, 83, 84, 85, 86, 87, 88, 89, 90, 91, 92, 93, 94, 95, 96, 97, 98, 99, 100, 101, 102, 103, 104, 105, 106, 107, 108, 109, 110, 111, 112, 113, 114, 115, 116, 117, 118, 119, 120, 121, 122, 123, 124, 125, 126, 127, 128, 129, 130, 131, 132, 133, 134, 135, 136, 137, 138, 139, 140, 141, 142, 143, 144, 145, 146, 147, 148, 149, 150, 151, 152, 153, 154, 155, 156, 157, 158, 159, 160, 161, 162, 163, 164, 165, 166, 167, 168, 169, 170, 171, 172, 173, 174, 175, 176, 177, 178, 179, 180, 181, 182, 183, 184, 185, 186, 187, 188, 189, 190, 191, 192, 193, 194, 195, 196, 197, 198, 199, 200, 201, 202, 203, 204, 205, 206, 207, 208, 209, 210, 211, 212, 213, 214, 215, 216, 217, 218, 219, 220, 221, 222, 223, 224, 225, 226, 227, 228, 229, 230, 231, 232, 233, 234, 235, 236, 237, 238, 239, 240, 241, 242, 243, 244, 245, 246, 247, 248, 249, 250, 251, 252, 253, 254, 255, 256, 257, 258, 259, 260, 261, 262, 263, 264, 265, 266, 267, 268, 269, 270, 271, 272, 273, 274, 275, 276, 277, 278, 279, 280, 281, 282, 283, 284, 285, 286, 287, 288, 289, 290, 291, 292, 293, 294, 295, 296, 297, 298, 299, 300, 301, 302, 303, 304, 305, 306, 307, 308, 309, 310, 311, 312, 313, 314, 315, 316, 317, 318, 319, 320, 321, 322, 323, 324, 325, 326, 327, 328, 329, 330, 331, 332, 333, 334, 335, 336, 337, 338, 339, 340, 341, 342, 343, 344, 345, 346, 347, 348, 349, 350, 351, 352, 353, 354, 355, 356, 357, 358, 359, 360, 361, 362, 363, 364, 365, 366, 367, 368, 369, 370, 371, 372, 373, 374, 375, 376, 377, 378, 379, 380, 381, 382, 383, 384, 385, 386, 387, 388, 389, 390, 391, 392, and/or 393 or an active variant or fragment thereof to produce a library of recombinant polynucleotides encoding recombinant pesticidal polypeptides;

[0154] (b) screening the library to identify a recombinant polynucleotide that encodes an improved recombinant pesticidal polypeptide that has an enhanced property improved over the parental polynucleotide;

[0155] (c) recovering the recombinant polynucleotide that encodes the improved recombinant pesticidal polypeptide identified in (b); and,

[0156] (d) repeating steps (a), (b) and (c) using the recombinant polynucleotide recovered in step (c) as one of the plurality of parental polynucleotides in repeated step (a).

[0157] The following examples are offered by way of illustration and not by way of limitation.

### EXPERIMENTAL

### Experiment 1: Discovery of Novel Genes by Sequencing and DNA Analysis

[0158] Microbial cultures were grown in liquid culture in standard laboratory media. Cultures were grown to saturation (16 to 24 hours) before DNA preparation. DNA was extracted from bacterial cells by detergent lysis, followed by binding to a silica matrix and washing with an ethanol buffer. Purified DNA was eluted from the silica matrix with a mildly alkaline aqueous buffer.

[0159] DNA for sequencing was tested for purity and concentration by spectrophotometry. Sequencing libraries were prepared using the Nextera XT library preparation kit according to the manufacturer's protocol. Sequence data was generated on a HiSeq 2000 according to the Illumina HiSeq 2000 System User Guide protocol.

[0160] Sequencing reads were assembled into draft genomes using the CLC Bio Assembly Cell software package. Following assembly, gene calls were made by several methods and resulting gene sequences were interrogated to identify novel homologs of pesticidal genes. Novel genes were identified by BLAST, by domain composition, and by pairwise alignment versus a target set of pesticidal genes. A summary of such sequences is set forth in Table 1.

[0161] Genes identified in the homology search were amplified from bacterial DNA by PCR and cloned into bacterial expression vectors containing fused in-frame purification tags. Cloned genes were expressed in E. coli and purified by column chromatography. Purified proteins were assessed in insect diet bioassay studies to identify active proteins.

### Example 2. Heterologous Expression in E. Coli

[0162] Each open reading frame set forth in any one of SEQ ID NO: 1, 2, 3, 4, 5, 6, 7, 8, 9, 10, 11, 12, 13, 14, 15, 16, 17, 18, 19, 20, 21, 22, 23, 24, 25, 26, 27, 28, 29, 30, 31, 32, 33, 34, 35, 36, 37, 38, 39, 40, 41, 42, 43, 44, 45, 46, 47, 48, 49, 50, 51, 52, 53, 54, 55, 56, 57, 58, 59, 60, 61, 62, 63, 64, 65, 66, 67, 68, 69, 70, 71, 72, 73, 74, 75, 76, 77, 78, 79, 80, 81, 82, 83, 84, 85, 86, 87, 88, 89, 90, 91, 92, 93, 94, 95, 96, 97, 98, 99, 100, 101, 102, 103, 104, 105, 106, 107, 108, 109, 110, 111, 112, 113, 114, 115, 116, 117, 118, 119, 120, 121, 122, 123, 124, 125, 126, 127, 128, 129, 130, 131, 132, 133, 134, 135, 136, 137, 138, 139, 140, 141, 142, 143, 144, 145, 146, 147, 148, 149, 150, 151, 152, 153, 154, 155, 156, 157, 158, 159, 160, 161, 162, 163, 164, 165, 166, 167, 168, 169, 170, 171, 172, 173, 174, 175, 176, 177, 178, 179, 180, 181, 182, 183, 184, 185, 186, 187, 188, 189, 190, 191, 192, 193, 194, 195, 196, 197, 198, 199, 200, 201, 202, 203, 204, 205, 206, 207, 208, 209, 210, 211, 212, 213, 214, 215, 216, 217, 218, 219, 220, 221, 222, 223, 224, 225, 226, 227, 228, 229, 230, 231, 232, 233, 234, 235, 236, 237, 238, 239, 240, 241, 242, 243, 244, 245, 246, 247, 248, 249, 250, 251, 252, 253, 254, 255, 256, 257, 258, 259, 260, 261, 262, 263, 264, 265, 266, 267, 268, 269, 270, 271, 272, 273, 274, 275, 276, 277, 278, 279, 280, 281, 282, 283, 284, 285, 286, 287, 288, 289, 290, 291, 292, 293, 294, 295, 296, 297, 298, 299, 300, 301, 302, 303, 304, 305, 306, 307, 308, 309, 310, 311, 312, 313, 314, 315, 316, 317, 318, 319, 320, 321, 322, 323, 324, 325, 326, 327, 328, 329, 330, 331, 332, 333, 334, 335, 336, 337, 338, 339, 340, 341, 342, 343, 344, 345, 346, 347, 348, 349, 350, 351, 352, 353, 354, 355, 356, 357, 358, 359, 360, 361, 362, 363, 364, 365, 366, 367, 368, 369, 370, 371, 372, 373, 374, 375, 376, 377, 378, 379, 380, 381, 382, 383, 384, 385, 386, 387, 388, 389, 390, 391, 392, and/or 393 or active variants or fragments thereof is cloned into an E. coli expression vector containing a maltose binding protein (pMBP). The expression vector is transformed into BL21*RIPL. An LB culture supplemented with carbenicillin is inoculated with a single colony and grown overnight at 37 degrees C. using 0.5% of the overnight culture, a fresh culture is inoculated and grown to logarithmic phase at 37 degrees C. The culture is induced using 250 mM IPTG for 18 hours at 16 degrees C. The cells are pelleted and resuspended in 10 mM Tris pH7.4 and 150 mM NaCl supplemented with protease inhibitors. The protein expression is evaluated by SDS-PAGE.

### Example 3. Pesticidal Activity Against Coleopteran and Lepidoptera

[0163] Methods

[0164] Protein Expression:

[0165] Each sequence set forth in SEQ ID NO: 1, 2, 3, 4, 5, 6, 7, 8, 9, 10, 11, 12, 13, 14, 15, 16, 17, 18, 19, 20, 21, 22, 23, 24, 25, 26, 27, 28, 29, 30, 31, 32, 33, 34, 35, 36, 37, 38, 39, 40, 41, 42, 43, 44, 45, 46, 47, 48, 49, 50, 51, 52, 53, 54, 55, 56, 57, 58, 59, 60, 61, 62, 63, 64, 65, 66, 67, 68, 69, 70, 71, 72, 73, 74, 75, 76, 77, 78, 79, 80, 81, 82, 83, 84, 85, 86, 87, 88, 89, 90, 91, 92, 93, 94, 95, 96, 97, 98, 99, 100, 101, 102, 103, 104, 105, 106, 107, 108, 109, 110, 111, 112, 113, 114, 115, 116, 117, 118, 119, 120, 121, 122, 123, 124, 125, 126, 127, 128, 129, 130, 131, 132, 133, 134, 135, 136, 137, 138, 139, 140, 141, 142, 143, 144, 145, 146, 147, 148, 149, 150, 151, 152, 153, 154, 155, 156, 157, 158, 159, 160, 161, 162, 163, 164, 165, 166, 167, 168, 169, 170, 171, 172, 173, 174, 175, 176, 177, 178, 179, 180, 181, 182, 183, 184, 185, 186, 187, 188, 189, 190, 191, 192, 193, 194, 195, 196, 197, 198, 199, 200, 201, 202, 203, 204, 205, 206, 207, 208, 209, 210, 211, 212, 213, 214, 215, 216, 217, 218, 219, 220, 221, 222, 223, 224, 225, 226, 227, 228, 229, 230, 231, 232, 233, 234, 235, 236, 237, 238, 239, 240, 241, 242, 243, 244, 245, 246, 247, 248, 249, 250, 251, 252, 253, 254, 255, 256, 257, 258, 259, 260, 261, 262, 263, 264, 265, 266, 267, 268, 269, 270, 271, 272, 273, 274, 275, 276, 277, 278, 279, 280, 281, 282, 283, 284, 285, 286, 287, 288, 289, 290, 291, 292, 293, 294, 295, 296, 297, 298, 299, 300, 301, 302, 303, 304, 305, 306, 307, 308, 309, 310, 311, 312, 313, 314, 315, 316, 317, 318, 319, 320, 321, 322, 323, 324, 325, 326, 327, 328, 329, 330, 331, 332, 333, 334, 335, 336, 337, 338, 339, 340, 341, 342, 343, 344, 345, 346, 347, 348, 349, 350, 351, 352, 353, 354, 355, 356, 357, 358, 359, 360, 361, 362, 363, 364, 365, 366, 367, 368, 369, 370, 371, 372, 373, 374, 375, 376, 377, 378, 379, 380, 381, 382, 383, 384, 385, 386, 387, 388, 389, 390, 391, 392, and/or 393 or active variants or fragments thereof is expressed in E. coli as described in Example 2. 400 mL of LB is inoculated and grown to an OD600 of 0.6. The culture is induced with 0.25 mM IPTG overnight at 16 C. The cells are spun down and the cell pellet is resuspend in 5 mL of buffer. The resuspension is sonicated for 2 min on ice.

[0166] Bioassay:

[0167] Fall army worm (FAW), corn ear worm (CEW), European corn borer (ECB) southwestern corn borer (SWCB) and diamond backed moth (DBM) eggs are purchased from a commercial insectary (Benzon Research Inc., Carlisle, Pa.). The FAW, CEW, ECB and BCW eggs are incubated to the point that eclosion would occur within 12 hrs of the assay setup. SWCB and DBM are introduced to the assay as neonate larvae. Assays are carried out in 24-well trays containing multispecies lepidopteran diet (SOUTHLAND PRODUCTS INCORPORATED, Lake Village, Ark.). Samples of the sonicated lysate are applied to the surface of the diet (diet overlay) and allowed to evaporate and soak into the diet. For CEW, FAW, BCW, ECB and SWCB, a 125 μl of sonicated lysate is added to the diet surface and dried. For DBM, 50 μl of a 1:2 dilution of sonicated lysate was added to the diet surface. The bioassay plates are sealed with a plate sealing film vented with pin holes. The plates are incubated at 26 C at 65% RH on a 16:8 day:night cycle in a Percival for 5 days. The assays are assessed for level of mortality, growth inhibition and feeding inhibition.

[0168] For the western corn rootworm bioassay, the protein construct/lysate is evaluated in an insect bioassay by dispensing 60 μl volume on the top surface of diet in well/s of 24-well plate (Cellstar, 24-well, Greiner Bio One) and allowed to dry. Each well contains 500 μl diet (Marrone et al., 1985). Fifteen to twenty neonate larvae are introduced in each well using a fine tip paint brush and the plate is covered with membrane (Viewseal, Greiner Bio One). The bioassay is stored at ambient temperature and scored for mortality, and/or growth/feeding inhibition at day 4.

[0169] For Colorado Potato Beetle (CPB) a cork bore size No. 8 leaf disk is excised from potato leaf and is dipped in the protein construct/lysate until thoroughly wet and placed on top of filter disk (Millipore, glass fiber filter, 13 mm). Sixty μl dH₂O is added to each filter disk and placed in each well of 24-well plate (Cellstar, 24-well, Greiner Bio One). The leaf disk is allowed to dry and five to seven first instar larvae are introduced in each well using a fine tip paint brush. The plate is covered with membrane (Viewseal, Greiner Bio One) and small hole is punctured in each well of the membrane. The construct is evaluated with four replicates, and scored for mortality and leaf damage on day 3.

### Example 4. Pesticidal Activity Against Hemipteran

[0170] Protein Expression:

[0171] Each of the sequences set forth in SEQ ID NOS: 1, 2, 3, 4, 5, 6, 7, 8, 9, 10, 11, 12, 13, 14, 15, 16, 17, 18, 19, 20, 21, 22, 23, 24, 25, 26, 27, 28, 29, 30, 31, 32, 33, 34, 35, 36, 37, 38, 39, 40, 41, 42, 43, 44, 45, 46, 47, 48, 49, 50, 51, 52, 53, 54, 55, 56, 57, 58, 59, 60, 61, 62, 63, 64, 65, 66, 67, 68, 69, 70, 71, 72, 73, 74, 75, 76, 77, 78, 79, 80, 81, 82, 83, 84, 85, 86, 87, 88, 89, 90, 91, 92, 93, 94, 95, 96, 97, 98, 99, 100, 101, 102, 103, 104, 105, 106, 107, 108, 109, 110, 111, 112, 113, 114, 115, 116, 117, 118, 119, 120, 121, 122, 123, 124, 125, 126, 127, 128, 129, 130, 131, 132, 133, 134, 135, 136, 137, 138, 139, 140, 141, 142, 143, 144, 145, 146, 147, 148, 149, 150, 151, 152, 153, 154, 155, 156, 157, 158, 159, 160, 161, 162, 163, 164, 165, 166, 167, 168, 169, 170, 171, 172, 173, 174, 175, 176, 177, 178, 179, 180, 181, 182, 183, 184, 185, 186, 187, 188, 189, 190, 191, 192, 193, 194, 195, 196, 197, 198, 199, 200, 201, 202, 203, 204, 205, 206, 207, 208, 209, 210, 211, 212, 213, 214, 215, 216, 217, 218, 219, 220, 221, 222, 223, 224, 225, 226, 227, 228, 229, 230, 231, 232, 233, 234, 235, 236, 237, 238, 239, 240, 241, 242, 243, 244, 245, 246, 247, 248, 249, 250, 251, 252, 253, 254, 255, 256, 257, 258, 259, 260, 261, 262, 263, 264, 265, 266, 267, 268, 269, 270, 271, 272, 273, 274, 275, 276, 277, 278, 279, 280, 281, 282, 283, 284, 285, 286, 287, 288, 289, 290, 291, 292, 293, 294, 295, 296, 297, 298, 299, 300, 301, 302, 303, 304, 305, 306, 307, 308, 309, 310, 311, 312, 313, 314, 315, 316, 317, 318, 319, 320, 321, 322, 323, 324, 325, 326, 327, 328, 329, 330, 331, 332, 333, 334, 335, 336, 337, 338, 339, 340, 341, 342, 343, 344, 345, 346, 347, 348, 349, 350, 351, 352, 353, 354, 355, 356, 357, 358, 359, 360, 361, 362, 363, 364, 365, 366, 367, 368, 369, 370, 371, 372, 373, 374, 375, 376, 377, 378, 379, 380, 381, 382, 383, 384, 385, 386, 387, 388, 389, 390, 391, 392, and/or 393 or active variants or fragments thereof is expressed in E. coli as described in Example 2. 400 mL of LB is inoculated and grown to an OD600 of 0.6. The culture is induced with 0.25 mM IPTG overnight at 16 C. The cells are spun down and the cell pellet is re-suspend in 5 mL of buffer. The resuspension is sonicated for 2 min on ice.

[0172] Second instar SGSB are obtained from a commercial insectary (Benzon Research Inc., Carlisle, Pa.). A 50% v/v ratio of sonicated lysate sample to 20% sucrose is employed in the bioassay. Stretched parafilm is used as a feeding membrane to expose the SGSB to the diet/sample mixture. The plates are incubated at 25 C:21 C, 16:8 day:night cycle at 65% RH for 5 days.

[0173] Mortality is scored for each sample.

### Example 5. Transformation of Soybean

[0174] DNA constructs comprising each of SEQ ID NOS: 1, 2, 3, 4, 5, 6, 7, 8, 9, 10, 11, 12, 13, 14, 15, 16, 17, 18, 19, 20, 21, 22, 23, 24, 25, 26, 27, 28, 29, 30, 31, 32, 33, 34, 35, 36, 37, 38, 39, 40, 41, 42, 43, 44, 45, 46, 47, 48, 49, 50, 51, 52, 53, 54, 55, 56, 57, 58, 59, 60, 61, 62, 63, 64, 65, 66, 67, 68, 69, 70, 71, 72, 73, 74, 75, 76, 77, 78, 79, 80, 81, 82, 83, 84, 85, 86, 87, 88, 89, 90, 91, 92, 93, 94, 95, 96, 97, 98, 99, 100, 101, 102, 103, 104, 105, 106, 107, 108, 109, 110, 111, 112, 113, 114, 115, 116, 117, 118, 119, 120, 121, 122, 123, 124, 125, 126, 127, 128, 129, 130, 131, 132, 133, 134, 135, 136, 137, 138, 139, 140, 141, 142, 143, 144, 145, 146, 147, 148, 149, 150, 151, 152, 153, 154, 155, 156, 157, 158, 159, 160, 161, 162, 163, 164, 165, 166, 167, 168, 169, 170, 171, 172, 173, 174, 175, 176, 177, 178, 179, 180, 181, 182, 183, 184, 185, 186, 187, 188, 189, 190, 191, 192, 193, 194, 195, 196, 197, 198, 199, 200, 201, 202, 203, 204, 205, 206, 207, 208, 209, 210, 211, 212, 213, 214, 215, 216, 217, 218, 219, 220, 221, 222, 223, 224, 225, 226, 227, 228, 229, 230, 231, 232, 233, 234, 235, 236, 237, 238, 239, 240, 241, 242, 243, 244, 245, 246, 247, 248, 249, 250, 251, 252, 253, 254, 255, 256, 257, 258, 259, 260, 261, 262, 263, 264, 265, 266, 267, 268, 269, 270, 271, 272, 273, 274, 275, 276, 277, 278, 279, 280, 281, 282, 283, 284, 285, 286, 287, 288, 289, 290, 291, 292, 293, 294, 295, 296, 297, 298, 299, 300, 301, 302, 303, 304, 305, 306, 307, 308, 309, 310, 311, 312, 313, 314, 315, 316, 317, 318, 319, 320, 321, 322, 323, 324, 325, 326, 327, 328, 329, 330, 331, 332, 333, 334, 335, 336, 337, 338, 339, 340, 341, 342, 343, 344, 345, 346, 347, 348, 349, 350, 351, 352, 353, 354, 355, 356, 357, 358, 359, 360, 361, 362, 363, 364, 365, 366, 367, 368, 369, 370, 371, 372, 373, 374, 375, 376, 377, 378, 379, 380, 381, 382, 383, 384, 385, 386, 387, 388, 389, 390, 391, 392, and/or 393 or active variants or fragments thereof operably linked to a promoter active in a plant are cloned into transformation vectors and introduced into Agrobacterium as described in U.S. Provisional Application No. 62/094,782, filed Dec. 19, 2015, herein incorporated by reference in its entirety.

[0175] Four days prior to inoculation, several loops of Agrobacterium are streaked to a fresh plate of YEP* medium supplemented with the appropriate antibiotics** (spectinomycin, chloramphenicol and kanamycin). Bacteria are grown for two days in the dark at 28 C. After two days, several loops of bacteria are transferred to 3 ml of YEP liquid medium with antibiotics in a 125 ml Erlenmeyer flask. Flasks are placed on a rotary shaker at 250 RPM at 28 C overnight. One day before inoculation, 2-3 ml of the overnight culture were transferred to 125 ml of YEP with antibiotics in a 500 ml Erlenmeyer flask. Flasks are placed on a rotary shaker at 250 RPM at 28 C overnight.

[0176] Prior to inoculation, the OD of the bacterial culture is checked at OD 620. An OD of 0.8-1.0 indicates that the culture is in log phase. The culture is centrifuged at 4000 RPM for 10 minutes in Oakridge tubes. The supernatant is discarded and the pellet is resuspended in a volume of Soybean Infection Medium (SI) to achieve the desired OD. The cultures are held with periodic mixing until needed for inoculation.

[0177] Two or three days prior to inoculation, soybean seeds are surface sterilized using chlorine gas. In a fume hood, a petri dish with seeds is place in a bell jar with the lid off. 1.75 ml of 12 N HCl is slowly added to 100 ml of bleach in a 250 ml Erlenmeyer flask inside the bell jar. The lid is immediately placed on top of the bell jar. Seeds are allowed to sterilize for 14-16 hours (overnight). The top is removed from the bell jar and the lid of the petri dish is replaced. The petri dish with the surface sterilized is then opened in a laminar flow for around 30 minutes to disperse any remaining chlorine gas.

[0178] Seeds are imbibed with either sterile DI water or soybean infection medium (SI) for 1-2 days. Twenty to 30 seeds are covered with liquid in a 100×25 mm petri dish and incubated in the dark at 24 C. After imbibition, non-germinating seeds are discarded.

[0179] Cotyledonary explants is processed on a sterile paper plate with sterile filter paper dampened using SI medium employing the methods of U.S. Pat. No. 7,473,822, herein incorporated by reference.

[0180] Typically, 16-20 cotyledons are inoculated per treatment. The SI medium used for holding the explants is discarded and replaced with 25 ml of Agrobacterium culture (OD 620=0.8-20). After all explants are submerged, the inoculation is carried out for 30 minutes with periodic swirling of the dish. After 30 minutes, the Agrobacterium culture is removed.

[0181] Co-cultivation plates is prepared by overlaying one piece of sterile paper onto Soybean Co-cultivation Medium (SCC). Without blotting, the inoculated cotyledons is cultured adaxial side down on the filter paper. Around 20 explants can be cultured on each plate. The plates are sealed with Parafilm and cultured at 24 C and around 120 umoles m-2s-1 (in a Percival incubator) for 4-5 days.

[0182] After co-cultivation, the cotyledons are washed 3 times in 25 ml of Soybean Wash Medium with 200 mg/l of cefotaxime and timentin. The cotyledons are blotted on sterile filter paper and then transferred to Soybean Shoot Induction Medium (SSI). The nodal end of the explant is depressed slightly into the medium with distal end kept above the surface at about 45 deg. No more than 10 explants are cultured on each plate. The plates are wrapped with Micropore tape and cultured in the Percival at 24 C and around 120 umoles m-2s-1.

[0183] The explants are transferred to fresh SSI medium after 14 days. Emerging shoots from the shoot apex and cotyledonary node are discarded. Shoot induction is continued for another 14 days under the same conditions.

[0184] After 4 weeks of shoot induction, the cotyledon is separated from the nodal end and a parallel cut is made underneath the area of shoot induction (shoot pad). The area of the parallel cut is placed on Soybean Shoot Elongation Medium (SSE) and the explants cultured in the Percival at 24 C and around 120 umoles m-2s-1. This step is repeated every two weeks for up to 8 weeks as long as shoots continue to elongate.

[0185] When shoots reach a length of 2-3 cm, they are transferred to Soybean Rooting Medium (SR) in a Plantcon vessel and incubated under the same conditions for 2 weeks or until roots reach a length of around 3-4 cm. After this, plants are transferred to soil.

[0186] Note, all media mentioned for soybean transformation are found in Paz et al. (2010) Agrobacterium-mediated transformation of soybean and recovery of transgenic soybean plants; Plant Transformation Facility of Iowa State University, which is herein incorporated by reference in its entirety. (See, agron-www.agron.iastate.edu/ptf/protocol/Soybean.pdf.)

### Example 6. Transformation of Maize

[0187] Maize ears are best collected 8-12 days after pollination. Embryos are isolated from the ears, and those embryos 0.8-1.5 mm in size are preferred for use in transformation. Embryos are plated scutellum side-up on a suitable incubation media, such as DN62A5S media (3.98 g/L N6 Salts; 1 mL/L (of 1000.times. Stock) N6 Vitamins; 800 mg/L L-Asparagine; 100 mg/L Myo-inositol; 1.4 g/L L-Proline; 100 mg/L Casamino acids; 50 g/L sucrose; 1 mL/L (of 1 mg/mL Stock) 2,4-D). However, media and salts other than DN62A5S are suitable and are known in the art. Embryos are incubated overnight at 25 degree C. in the dark. However, it is not necessary per se to incubate the embryos overnight.

[0188] The resulting explants are transferred to mesh squares (30-40 per plate), transferred onto osmotic media for about 30-45 minutes, then transferred to a beaming plate (see, for example, PCT Publication No. WO/0138514 and U.S. Pat. No. 5,240,842). DNA constructs designed to express any one of SEQ ID NOS: 1, 2, 3, 4, 5, 6, 7, 8, 9, 10, 11, 12, 13, 14, 15, 16, 17, 18, 19, 20, 21, 22, 23, 24, 25, 26, 27, 28, 29, 30, 31, 32, 33, 34, 35, 36, 37, 38, 39, 40, 41, 42, 43, 44, 45, 46, 47, 48, 49, 50, 51, 52, 53, 54, 55, 56, 57, 58, 59, 60, 61, 62, 63, 64, 65, 66, 67, 68, 69, 70, 71, 72, 73, 74, 75, 76, 77, 78, 79, 80, 81, 82, 83, 84, 85, 86, 87, 88, 89, 90, 91, 92, 93, 94, 95, 96, 97, 98, 99, 100, 101, 102, 103, 104, 105, 106, 107, 108, 109, 110, 111, 112, 113, 114, 115, 116, 117, 118, 119, 120, 121, 122, 123, 124, 125, 126, 127, 128, 129, 130, 131, 132, 133, 134, 135, 136, 137, 138, 139, 140, 141, 142, 143, 144, 145, 146, 147, 148, 149, 150, 151, 152, 153, 154, 155, 156, 157, 158, 159, 160, 161, 162, 163, 164, 165, 166, 167, 168, 169, 170, 171, 172, 173, 174, 175, 176, 177, 178, 179, 180, 181, 182, 183, 184, 185, 186, 187, 188, 189, 190, 191, 192, 193, 194, 195, 196, 197, 198, 199, 200, 201, 202, 203, 204, 205, 206, 207, 208, 209, 210, 211, 212, 213, 214, 215, 216, 217, 218, 219, 220, 221, 222, 223, 224, 225, 226, 227, 228, 229, 230, 231, 232, 233, 234, 235, 236, 237, 238, 239, 240, 241, 242, 243, 244, 245, 246, 247, 248, 249, 250, 251, 252, 253, 254, 255, 256, 257, 258, 259, 260, 261, 262, 263, 264, 265, 266, 267, 268, 269, 270, 271, 272, 273, 274, 275, 276, 277, 278, 279, 280, 281, 282, 283, 284, 285, 286, 287, 288, 289, 290, 291, 292, 293, 294, 295, 296, 297, 298, 299, 300, 301, 302, 303, 304, 305, 306, 307, 308, 309, 310, 311, 312, 313, 314, 315, 316, 317, 318, 319, 320, 321, 322, 323, 324, 325, 326, 327, 328, 329, 330, 331, 332, 333, 334, 335, 336, 337, 338, 339, 340, 341, 342, 343, 344, 345, 346, 347, 348, 349, 350, 351, 352, 353, 354, 355, 356, 357, 358, 359, 360, 361, 362, 363, 364, 365, 366, 367, 368, 369, 370, 371, 372, 373, 374, 375, 376, 377, 378, 379, 380, 381, 382, 383, 384, 385, 386, 387, 388, 389, 390, 391, 392, and/or 393 or active variants or fragments thereof in plant cells are accelerated into plant tissue using an aerosol beam accelerator, using conditions essentially as described in PCT Publication No. WO/0138514. After beaming, embryos are incubated for about 30 min on osmotic media, and placed onto incubation media overnight at 25 degree C. in the dark. To avoid unduly damaging beamed explants, they are incubated for at least 24 hours prior to transfer to recovery media. Embryos are then spread onto recovery period media, for about 5 days, 25 degree C. in the dark, then transferred to a selection media. Explants are incubated in selection media for up to eight weeks, depending on the nature and characteristics of the particular selection utilized. After the selection period, the resulting callus is transferred to embryo maturation media, until the formation of mature somatic embryos is observed. The resulting mature somatic embryos are then placed under low light, and the process of regeneration is initiated by methods known in the art. The resulting shoots are allowed to root on rooting media, and the resulting plants are transferred to nursery pots and propagated as transgenic plants.

### Example 7. Pesticidal Activity Against Nematodes

[0189] Heterodera Glycine's (Soybean Cyst Nematode) In-Vitro Assay.

[0190] Soybean Cyst Nematodes are dispensed into a 96 well assay plate with a total volume of 100 uls and 100 J2 per well. The protein of interest as set forth in any one of SEQ ID NOS: 1, 2, 3, 4, 5, 6, 7, 8, 9, 10, 11, 12, 13, 14, 15, 16, 17, 18, 19, 20, 21, 22, 23, 24, 25, 26, 27, 28, 29, 30, 31, 32, 33, 34, 35, 36, 37, 38, 39, 40, 41, 42, 43, 44, 45, 46, 47, 48, 49, 50, 51, 52, 53, 54, 55, 56, 57, 58, 59, 60, 61, 62, 63, 64, 65, 66, 67, 68, 69, 70, 71, 72, 73, 74, 75, 76, 77, 78, 79, 80, 81, 82, 83, 84, 85, 86, 87, 88, 89, 90, 91, 92, 93, 94, 95, 96, 97, 98, 99, 100, 101, 102, 103, 104, 105, 106, 107, 108, 109, 110, 111, 112, 113, 114, 115, 116, 117, 118, 119, 120, 121, 122, 123, 124, 125, 126, 127, 128, 129, 130, 131, 132, 133, 134, 135, 136, 137, 138, 139, 140, 141, 142, 143, 144, 145, 146, 147, 148, 149, 150, 151, 152, 153, 154, 155, 156, 157, 158, 159, 160, 161, 162, 163, 164, 165, 166, 167, 168, 169, 170, 171, 172, 173, 174, 175, 176, 177, 178, 179, 180, 181, 182, 183, 184, 185, 186, 187, 188, 189, 190, 191, 192, 193, 194, 195, 196, 197, 198, 199, 200, 201, 202, 203, 204, 205, 206, 207, 208, 209, 210, 211, 212, 213, 214, 215, 216, 217, 218, 219, 220, 221, 222, 223, 224, 225, 226, 227, 228, 229, 230, 231, 232, 233, 234, 235, 236, 237, 238, 239, 240, 241, 242, 243, 244, 245, 246, 247, 248, 249, 250, 251, 252, 253, 254, 255, 256, 257, 258, 259, 260, 261, 262, 263, 264, 265, 266, 267, 268, 269, 270, 271, 272, 273, 274, 275, 276, 277, 278, 279, 280, 281, 282, 283, 284, 285, 286, 287, 288, 289, 290, 291, 292, 293, 294, 295, 296, 297, 298, 299, 300, 301, 302, 303, 304, 305, 306, 307, 308, 309, 310, 311, 312, 313, 314, 315, 316, 317, 318, 319, 320, 321, 322, 323, 324, 325, 326, 327, 328, 329, 330, 331, 332, 333, 334, 335, 336, 337, 338, 339, 340, 341, 342, 343, 344, 345, 346, 347, 348, 349, 350, 351, 352, 353, 354, 355, 356, 357, 358, 359, 360, 361, 362, 363, 364, 365, 366, 367, 368, 369, 370, 371, 372, 373, 374, 375, 376, 377, 378, 379, 380, 381, 382, 383, 384, 385, 386, 387, 388, 389, 390, 391, 392, and/or 393 or an active variant or fragment thereof is dispensed into the wells and held at room temperature for assessment. Finally the 96 well plate containing the SCN J2 is analyzed for motility. Data is reported as % inhibition as compared to the controls. Hits are defined as greater or equal to 70% inhibition.

[0191] Heterodera Glycine's (Soybean Cyst Nematode) On-Plant Assay

[0192] Soybean plants expressing one or more of SEQ ID NO: 1, 2, 3, 4, 5, 6, 7, 8, 9, 10, 11, 12, 13, 14, 15, 16, 17, 18, 19, 20, 21, 22, 23, 24, 25, 26, 27, 28, 29, 30, 31, 32, 33, 34, 35, 36, 37, 38, 39, 40, 41, 42, 43, 44, 45, 46, 47, 48, 49, 50, 51, 52, 53, 54, 55, 56, 57, 58, 59, 60, 61, 62, 63, 64, 65, 66, 67, 68, 69, 70, 71, 72, 73, 74, 75, 76, 77, 78, 79, 80, 81, 82, 83, 84, 85, 86, 87, 88, 89, 90, 91, 92, 93, 94, 95, 96, 97, 98, 99, 100, 101, 102, 103, 104, 105, 106, 107, 108, 109, 110, 111, 112, 113, 114, 115, 116, 117, 118, 119, 120, 121, 122, 123, 124, 125, 126, 127, 128, 129, 130, 131, 132, 133, 134, 135, 136, 137, 138, 139, 140, 141, 142, 143, 144, 145, 146, 147, 148, 149, 150, 151, 152, 153, 154, 155, 156, 157, 158, 159, 160, 161, 162, 163, 164, 165, 166, 167, 168, 169, 170, 171, 172, 173, 174, 175, 176, 177, 178, 179, 180, 181, 182, 183, 184, 185, 186, 187, 188, 189, 190, 191, 192, 193, 194, 195, 196, 197, 198, 199, 200, 201, 202, 203, 204, 205, 206, 207, 208, 209, 210, 211, 212, 213, 214, 215, 216, 217, 218, 219, 220, 221, 222, 223, 224, 225, 226, 227, 228, 229, 230, 231, 232, 233, 234, 235, 236, 237, 238, 239, 240, 241, 242, 243, 244, 245, 246, 247, 248, 249, 250, 251, 252, 253, 254, 255, 256, 257, 258, 259, 260, 261, 262, 263, 264, 265, 266, 267, 268, 269, 270, 271, 272, 273, 274, 275, 276, 277, 278, 279, 280, 281, 282, 283, 284, 285, 286, 287, 288, 289, 290, 291, 292, 293, 294, 295, 296, 297, 298, 299, 300, 301, 302, 303, 304, 305, 306, 307, 308, 309, 310, 311, 312, 313, 314, 315, 316, 317, 318, 319, 320, 321, 322, 323, 324, 325, 326, 327, 328, 329, 330, 331, 332, 333, 334, 335, 336, 337, 338, 339, 340, 341, 342, 343, 344, 345, 346, 347, 348, 349, 350, 351, 352, 353, 354, 355, 356, 357, 358, 359, 360, 361, 362, 363, 364, 365, 366, 367, 368, 369, 370, 371, 372, 373, 374, 375, 376, 377, 378, 379, 380, 381, 382, 383, 384, 385, 386, 387, 388, 389, 390, 391, 392, and/or 393 are generated as described elsewhere herein. A 3-week-old soybean cutting is inoculated with 5000 SCN eggs per plant. This infection is held for 70 days and then harvested for counting of SCN cyst that has developed on the plant. Data is reported as % inhibition as compared to the controls. Hits are defined as greater or equal to 90% inhibition.

Meloidogyne incognita (Root-Knot Nematode) In-Vitro Assay

[0193] Root-Knot Nematodes are dispensed into a 96 well assay plate with a total volume of 100 uls and 100 J2 per well. The protein of interest comprising any one of SEQ ID NO: 1-393 is dispensed into the wells and held at room temperature for assessment. Finally the 96 well plate containing the RKN J2 is analyzed for motility. Data is reported as % inhibition as compared to the controls. Hits are defined as greater or equal to 70% inhibition.

Meloidogyne incognita (Root-Knot Nematode) On-Plant Assay

[0194] Soybean plants expressing one or more of SEQ ID NO: 1, 2, 3, 4, 5, 6, 7, 8, 9, 10, 11, 12, 13, 14, 15, 16, 17, 18, 19, 20, 21, 22, 23, 24, 25, 26, 27, 28, 29, 30, 31, 32, 33, 34, 35, 36, 37, 38, 39, 40, 41, 42, 43, 44, 45, 46, 47, 48, 49, 50, 51, 52, 53, 54, 55, 56, 57, 58, 59, 60, 61, 62, 63, 64, 65, 66, 67, 68, 69, 70, 71, 72, 73, 74, 75, 76, 77, 78, 79, 80, 81, 82, 83, 84, 85, 86, 87, 88, 89, 90, 91, 92, 93, 94, 95, 96, 97, 98, 99, 100, 101, 102, 103, 104, 105, 106, 107, 108, 109, 110, 111, 112, 113, 114, 115, 116, 117, 118, 119, 120, 121, 122, 123, 124, 125, 126, 127, 128, 129, 130, 131, 132, 133, 134, 135, 136, 137, 138, 139, 140, 141, 142, 143, 144, 145, 146, 147, 148, 149, 150, 151, 152, 153, 154, 155, 156, 157, 158, 159, 160, 161, 162, 163, 164, 165, 166, 167, 168, 169, 170, 171, 172, 173, 174, 175, 176, 177, 178, 179, 180, 181, 182, 183, 184, 185, 186, 187, 188, 189, 190, 191, 192, 193, 194, 195, 196, 197, 198, 199, 200, 201, 202, 203, 204, 205, 206, 207, 208, 209, 210, 211, 212, 213, 214, 215, 216, 217, 218, 219, 220, 221, 222, 223, 224, 225, 226, 227, 228, 229, 230, 231, 232, 233, 234, 235, 236, 237, 238, 239, 240, 241, 242, 243, 244, 245, 246, 247, 248, 249, 250, 251, 252, 253, 254, 255, 256, 257, 258, 259, 260, 261, 262, 263, 264, 265, 266, 267, 268, 269, 270, 271, 272, 273, 274, 275, 276, 277, 278, 279, 280, 281, 282, 283, 284, 285, 286, 287, 288, 289, 290, 291, 292, 293, 294, 295, 296, 297, 298, 299, 300, 301, 302, 303, 304, 305, 306, 307, 308, 309, 310, 311, 312, 313, 314, 315, 316, 317, 318, 319, 320, 321, 322, 323, 324, 325, 326, 327, 328, 329, 330, 331, 332, 333, 334, 335, 336, 337, 338, 339, 340, 341, 342, 343, 344, 345, 346, 347, 348, 349, 350, 351, 352, 353, 354, 355, 356, 357, 358, 359, 360, 361, 362, 363, 364, 365, 366, 367, 368, 369, 370, 371, 372, 373, 374, 375, 376, 377, 378, 379, 380, 381, 382, 383, 384, 385, 386, 387, 388, 389, 390, 391, 392, and/or 393 are generated as described elsewhere herein. A 3-week-old soybean is inoculated with 5000 RKN eggs per plant. This infection is held for 70 days and then harvested for counting of RKN eggs that have developed in the plant. Data is reported as % inhibition as compared to the controls. Hits are defined as greater or equal to 90% inhibition.

### Example 7. Additional Assays for Pesticidal Activity

[0195] The various polypeptides set forth in SEQ ID NO: 1, 2, 3, 4, 5, 6, 7, 8, 9, 10, 11, 12, 13, 14, 15, 16, 17, 18, 19, 20, 21, 22, 23, 24, 25, 26, 27, 28, 29, 30, 31, 32, 33, 34, 35, 36, 37, 38, 39, 40, 41, 42, 43, 44, 45, 46, 47, 48, 49, 50, 51, 52, 53, 54, 55, 56, 57, 58, 59, 60, 61, 62, 63, 64, 65, 66, 67, 68, 69, 70, 71, 72, 73, 74, 75, 76, 77, 78, 79, 80, 81, 82, 83, 84, 85, 86, 87, 88, 89, 90, 91, 92, 93, 94, 95, 96, 97, 98, 99, 100, 101, 102, 103, 104, 105, 106, 107, 108, 109, 110, 111, 112, 113, 114, 115, 116, 117, 118, 119, 120, 121, 122, 123, 124, 125, 126, 127, 128, 129, 130, 131, 132, 133, 134, 135, 136, 137, 138, 139, 140, 141, 142, 143, 144, 145, 146, 147, 148, 149, 150, 151, 152, 153, 154, 155, 156, 157, 158, 159, 160, 161, 162, 163, 164, 165, 166, 167, 168, 169, 170, 171, 172, 173, 174, 175, 176, 177, 178, 179, 180, 181, 182, 183, 184, 185, 186, 187, 188, 189, 190, 191, 192, 193, 194, 195, 196, 197, 198, 199, 200, 201, 202, 203, 204, 205, 206, 207, 208, 209, 210, 211, 212, 213, 214, 215, 216, 217, 218, 219, 220, 221, 222, 223, 224, 225, 226, 227, 228, 229, 230, 231, 232, 233, 234, 235, 236, 237, 238, 239, 240, 241, 242, 243, 244, 245, 246, 247, 248, 249, 250, 251, 252, 253, 254, 255, 256, 257, 258, 259, 260, 261, 262, 263, 264, 265, 266, 267, 268, 269, 270, 271, 272, 273, 274, 275, 276, 277, 278, 279, 280, 281, 282, 283, 284, 285, 286, 287, 288, 289, 290, 291, 292, 293, 294, 295, 296, 297, 298, 299, 300, 301, 302, 303, 304, 305, 306, 307, 308, 309, 310, 311, 312, 313, 314, 315, 316, 317, 318, 319, 320, 321, 322, 323, 324, 325, 326, 327, 328, 329, 330, 331, 332, 333, 334, 335, 336, 337, 338, 339, 340, 341, 342, 343, 344, 345, 346, 347, 348, 349, 350, 351, 352, 353, 354, 355, 356, 357, 358, 359, 360, 361, 362, 363, 364, 365, 366, 367, 368, 369, 370, 371, 372, 373, 374, 375, 376, 377, 378, 379, 380, 381, 382, 383, 384, 385, 386, 387, 388, 389, 390, 391, 392, and/or 393 can be tested to act as a pesticide upon a pest in a number of ways. One such method is to perform a feeding assay. In such a feeding assay, one exposes the pest to a sample containing either compounds to be tested or control samples. Often this is performed by placing the material to be tested, or a suitable dilution of such material, onto a material that the pest will ingest, such as an artificial diet. The material to be tested may be composed of a liquid, solid, or slurry. The material to be tested may be placed upon the surface and then allowed to dry. Alternatively, the material to be tested may be mixed with a molten artificial diet, and then dispensed into the assay chamber. The assay chamber may be, for example, a cup, a dish, or a well of a microtiter plate.

[0196] Assays for sucking pests (for example aphids) may involve separating the test material from the insect by a partition, ideally a portion that can be pierced by the sucking mouth parts of the sucking insect, to allow ingestion of the test material. Often the test material is mixed with a feeding stimulant, such as sucrose, to promote ingestion of the test compound.

[0197] Other types of assays can include microinjection of the test material into the mouth, or gut of the pest, as well as development of transgenic plants, followed by test of the ability of the pest to feed upon the transgenic plant. Plant testing may involve isolation of the plant parts normally consumed, for example, small cages attached to a leaf, or isolation of entire plants in cages containing insects.

[0198] Other methods and approaches to assay pests are known in the art, and can be found, for example in Robertson and Preisler, eds. (1992) Pesticide bioassays with arthropods, CRC, Boca Raton, Fla. Alternatively, assays are commonly described in the journals Arthropod Management Tests and Journal of Economic Entomology or by discussion with members of the Entomological Society of America (ESA). Any one of SEQ ID NOS: 1-393 can be expressed and employed in an assay as set forth in Examples 3 and 4, herein.

[0199] All publications and patent applications mentioned in the specification are indicative of the level of skill of those skilled in the art to which this invention pertains. All publications and patent applications are herein incorporated by reference to the same extent as if each individual publication or patent application was specifically and individually indicated to be incorporated by reference.

[0200] Although the foregoing invention has been described in some detail by way of illustration and example for purposes of clarity of understanding, it will be obvious that certain changes and modifications may be practiced within the scope of the appended claims.

That which is claimed is:

1. An isolated polypeptide having insecticidal activity, comprising
(a) a polypeptide comprising an amino acid sequence having at least 90% percent sequence identity to an amino acid sequence selected from the group consisting of sequences set forth in SEQ ID NO: 1, 2, 3, 4, 5, 6, 7, 8, 9, 10, 11, 12, 13, 14, 15, 16, 17, 18, 19, 20, 21, 22, 23, 24, 25, 26, 27, 28, 29, 30, 31, 32, 33, 34, 35, 36, 37, 38, 39, 40, 41, 42, 43, 44, 45, 46, 47, 48, 49, 50, 51, 52, 53, 54, 55, 56, 57, 58, 59, 60, 61, 62, 63, 64, 65, 66, 67, 68, 69, 70, 71, 72, 73, 74, 75, 76, 77, 78, 79, 80, 81, 82, 83, 84, 85, 86, 87, 88, 89, 90, 91, 92, 93, 94, 95, 96, 97, 98, 99, 100, 101, 102, 103, 104, 105, 106, 107, 108, 109, 110, 111, 112, 113, 114, 115, 116, 117, 118, 119, 120, 121, 122, 123, 124, 125, 126, 127, 128, 129, 130, 131, 132, 133, 134, 135, 136, 137, 138, 139, 140, 141, 142, 143, 144, 145, 146, 147, 148, 149, 150, 151, 152, 153, 154, 155, 156, 157, 158, 159, 160, 161, 162, 163, 164, 165, 166, 167, 168, 169, 170, 171, 172, 173, 174, 175, 176, 177, 178, 179, 180, 181, 182, 183, 184, 185, 186, 187, 188, 189, 190, 191, 192, 193, 194, 195, 196, 197, 198, 199, 200, 201, 202, 203, 204, 205, 206, 207, 208, 209, 210, 211, 212, 213, 214, 215, 216, 217, 218, 219, 220, 221, 222, 223, 224, 225, 226, 227, 228, 229, 230, 231, 232, 233, 234, 235, 236, 237, 238, 239, 240, 241, 242, 243, 244, 245, 246, 247, 248, 249, 250, 251, 252, 253, 254, 255, 256, 257, 258, 259, 260, 261, 262, 263, 264, 265, 266, 267, 268, 269, 270, 271, 272, 273, 274, 275, 276, 277, 278, 279, 280, 281, 282, 283, 284, 285, 286, 287, 288, 289, 290, 291, 292, 293, 294, 295, 296, 297, 298, 299, 300, 301, 302, 303, 304, 305, 306, 307, 308, 309, 310, 311, 312, 313, 314, 315, 316, 317, 318, 319, 320, 321, 322, 323, 324, 325, 326, 327, 328, 329, 330, 331, 332, 333, 334, 335, 336, 337, 338, 339, 340, 341, 342, 343, 344, 345, 346, 347, 348, 349, 350, 351, 352, 353, 354, 355, 356, 357, 358, 359, 360, 361, 362, 363, 364, 365, 366, 367, 368, 369, 370, 371, 372, 373, 374, 375, 376, 377, 378, 379, 380, 381, 382, 383, 384, 385, 386, 387, 388, 389, 390, 391, 392, and 393; or
(b) a polypeptide comprising the amino acid sequence set forth in SEQ ID NOs: 1, 2, 3, 4, 5, 6, 7, 8, 9, 10, 11, 12, 13, 14, 15, 16, 17, 18, 19, 20, 21, 22, 23, 24, 25, 26, 27, 28, 29, 30, 31, 32, 33, 34, 35, 36, 37, 38, 39, 40, 41, 42, 43, 44, 45, 46, 47, 48, 49, 50, 51, 52, 53, 54, 55, 56, 57, 58, 59, 60, 61, 62, 63, 64, 65, 66, 67, 68, 69, 70, 71, 72, 73, 74, 75, 76, 77, 78, 79, 80, 81, 82, 83, 84, 85, 86, 87, 88, 89, 90, 91, 92, 93, 94, 95, 96, 97, 98, 99, 100, 101, 102, 103, 104, 105, 106, 107, 108, 109, 110, 111, 112, 113, 114, 115, 116, 117, 118, 119, 120, 121, 122, 123, 124, 125, 126, 127, 128, 129, 130, 131, 132, 133, 134, 135, 136, 137, 138, 139, 140, 141, 142, 143, 144, 145, 146, 147, 148, 149, 150, 151, 152, 153, 154, 155, 156, 157, 158, 159, 160, 161, 162, 163, 164, 165, 166, 167, 168, 169, 170, 171, 172, 173, 174, 175, 176, 177, 178, 179, 180, 181, 182, 183, 184, 185, 186, 187, 188, 189, 190, 191, 192, 193, 194, 195, 196, 197, 198, 199, 200, 201, 202, 203, 204, 205, 206, 207, 208, 209, 210, 211, 212, 213, 214, 215, 216, 217, 218, 219, 220, 221, 222, 223, 224, 225, 226, 227, 228, 229, 230, 231, 232, 233, 234, 235, 236, 237, 238, 239, 240, 241, 242, 243, 244, 245, 246, 247, 248, 249, 250, 251, 252, 253, 254, 255, 256, 257, 258, 259, 260, 261, 262, 263, 264, 265, 266, 267, 268, 269, 270, 271, 272, 273, 274, 275, 276, 277, 278, 279, 280, 281, 282, 283, 284, 285, 286, 287, 288, 289, 290, 291, 292, 293, 294, 295, 296, 297, 298, 299, 300, 301, 302, 303, 304, 305, 306, 307, 308, 309, 310, 311, 312, 313, 314, 315, 316, 317, 318, 319, 320, 321, 322, 323, 324, 325, 326, 327, 328, 329, 330, 331, 332, 333, 334, 335, 336, 337, 338, 339, 340, 341, 342, 343, 344, 345, 346, 347, 348, 349, 350, 351, 352, 353, 354, 355, 356, 357, 358, 359, 360, 361, 362, 363, 364, 365, 366, 367, 368, 369, 370, 371, 372, 373, 374, 375, 376, 377, 378, 379, 380, 381, 382, 383, 384, 385, 386, 387, 388, 389, 390, 391, 392, and/or 393.

2. The polypeptide of claim 1, further comprising a heterologous amino acid sequences.

3. A composition comprising the polypeptide of claim 1.

4. A recombinant nucleic acid molecule that encodes the polypeptide of claim 1, wherein said recombinant nucleic acid molecule is not the naturally occurring sequence encoding said polypeptide.

5. The recombinant nucleic acid molecule of claim 4, wherein said nucleic acid molecule is a synthetic sequence that has been designed for expression in a plant.

6. The recombinant nucleic acid molecule of claim 4 wherein said recombinant nucleic acid molecule is operably linked to a promoter capable of directing expression in a plant cell.

7. The recombinant nucleic acid molecule of claim 4, wherein said recombinant nucleic acid molecule is operably linked to a promoter capable of directing expression in a bacterium.

8. A host cell comprising the recombinant nucleic acid molecule of claim 4.

9. The host cell of claim 8, wherein said host cell is a bacterial host cell.

10. A DNA construct comprising a promoter that drives expression in a plant cell operably linked to a recombinant nucleic acid molecule comprising
(a) a nucleotide sequence that encodes a polypeptide comprising an amino acid sequence having at least 90% percent sequence identity to an amino acid sequence selected from the group consisting of sequences set forth in SEQ ID NOs: 1, 2, 3, 4, 5, 6, 7, 8, 9, 10, 11, 12, 13, 14, 15, 16, 17, 18, 19, 20, 21, 22, 23, 24, 25, 26, 27, 28, 29, 30, 31, 32, 33, 34, 35, 36, 37, 38, 39, 40, 41, 42, 43, 44, 45, 46, 47, 48, 49, 50, 51, 52, 53, 54, 55, 56, 57, 58, 59, 60, 61, 62, 63, 64, 65, 66, 67, 68, 69, 70, 71, 72, 73, 74, 75, 76, 77, 78, 79, 80, 81, 82, 83, 84, 85, 86, 87, 88, 89, 90, 91, 92, 93, 94, 95, 96, 97, 98, 99, 100, 101, 102, 103, 104, 105, 106, 107, 108, 109, 110, 111, 112, 113, 114, 115, 116, 117, 118, 119, 120, 121, 122, 123, 124, 125, 126, 127, 128, 129, 130, 131, 132, 133, 134, 135, 136, 137, 138, 139, 140, 141, 142, 143, 144, 145, 146, 147, 148, 149, 150, 151, 152, 153, 154, 155, 156, 157, 158, 159, 160, 161, 162, 163, 164, 165, 166, 167, 168, 169, 170, 171, 172, 173, 174, 175, 176, 177, 178, 179, 180, 181, 182, 183, 184, 185, 186, 187, 188, 189, 190, 191, 192, 193, 194, 195, 196, 197, 198, 199, 200, 201, 202, 203, 204, 205, 206, 207, 208, 209, 210, 211, 212, 213, 214, 215, 216, 217, 218, 219, 220, 221, 222, 223, 224, 225, 226, 227, 228, 229, 230, 231, 232, 233, 234, 235, 236, 237, 238, 239, 240, 241, 242, 243, 244, 245, 246, 247, 248, 249, 250, 251, 252, 253, 254, 255, 256, 257, 258, 259, 260, 261, 262, 263, 264, 265, 266, 267, 268, 269, 270, 271, 272, 273, 274, 275, 276, 277, 278, 279, 280, 281, 282, 283, 284, 285, 286, 287, 288, 289, 290, 291, 292, 293, 294, 295, 296, 297, 298, 299, 300, 301, 302, 303, 304, 305, 306, 307, 308, 309, 310, 311, 312, 313, 314, 315, 316, 317, 318, 319, 320, 321, 322, 323, 324, 325, 326, 327, 328, 329, 330, 331, 332, 333, 334, 335, 336, 337, 338, 339, 340, 341, 342, 343, 344, 345, 346, 347, 348, 349, 350, 351, 352, 353, 354, 355, 356, 357, 358, 359, 360, 361, 362, 363, 364, 365, 366, 367, 368, 369, 370, 371, 372, 373, 374, 375, 376, 377, 378, 379, 380, 381, 382, 383, 384, 385, 386, 387, 388, 389, 390, 391, 392, and 393; or,
(b) a nucleotide sequence that encodes a polypeptide comprising an amino acid sequence selected from the group consisting of sequences set forth in SEQ ID NOs: 1, 2, 3, 4, 5, 6, 7, 8, 9, 10, 11, 12, 13, 14, 15, 16, 17, 18, 19, 20, 21, 22, 23, 24, 25, 26, 27, 28, 29, 30, 31, 32, 33, 34, 35, 36, 37, 38, 39, 40, 41, 42, 43, 44, 45, 46, 47, 48, 49, 50, 51, 52, 53, 54, 55, 56, 57, 58, 59, 60, 61, 62, 63, 64, 65, 66, 67, 68, 69, 70, 71, 72, 73, 74, 75, 76, 77, 78, 79, 80, 81, 82, 83, 84, 85, 86, 87, 88, 89, 90, 91, 92, 93, 94, 95, 96, 97, 98, 99, 100, 101, 102, 103, 104, 105, 106, 107, 108, 109, 110, 111, 112, 113, 114, 115, 116, 117, 118, 119, 120, 121, 122, 123, 124, 125, 126, 127, 128, 129, 130, 131, 132, 133, 134, 135, 136, 137, 138, 139, 140, 141, 142, 143, 144, 145, 146, 147, 148, 149, 150, 151, 152, 153, 154, 155, 156, 157, 158, 159, 160, 161, 162, 163, 164, 165, 166, 167, 168, 169, 170, 171, 172, 173, 174, 175, 176, 177, 178, 179, 180, 181, 182, 183, 184, 185, 186, 187, 188, 189, 190, 191, 192, 193, 194, 195, 196, 197, 198, 199, 200, 201, 202, 203, 204, 205, 206, 207, 208, 209, 210, 211, 212, 213, 214, 215, 216, 217, 218, 219, 220, 221, 222, 223, 224, 225, 226, 227, 228, 229, 230, 231, 232, 233, 234, 235, 236, 237, 238, 239, 240, 241, 242, 243, 244, 245, 246, 247, 248, 249, 250, 251, 252, 253, 254, 255, 256, 257, 258, 259, 260, 261, 262, 263, 264, 265, 266, 267, 268, 269, 270, 271, 272, 273, 274, 275, 276, 277, 278, 279, 280, 281, 282, 283, 284, 285, 286, 287, 288, 289, 290, 291, 292, 293, 294, 295, 296, 297, 298, 299, 300, 301, 302, 303, 304, 305, 306, 307, 308, 309, 310, 311, 312, 313, 314, 315, 316, 317, 318, 319, 320, 321, 322, 323, 324, 325, 326, 327, 328, 329, 330, 331, 332, 333, 334, 335, 336, 337, 338, 339, 340, 341, 342, 343, 344, 345, 346, 347, 348, 349, 350, 351, 352, 353, 354, 355, 356, 357, 358, 359, 360, 361, 362, 363, 364, 365, 366, 367, 368, 369, 370, 371, 372, 373, 374, 375, 376, 377, 378, 379, 380, 381, 382, 383, 384, 385, 386, 387, 388, 389, 390, 391, 392, and 393.

11. The DNA construct of claim 10, wherein said nucleotide sequence is a synthetic DNA sequence that has been designed for expression in a plant.

12. A vector comprising the DNA construct of claim 11.

13. A host cell that contains the vector of claim 12.

14. The host cell of claim 13, wherein the host cell is a plant cell.

15. A transgenic plant comprising the host cell of claim 14.

16. A composition comprising the host cell of claim 9.

17. The composition of claim 16, wherein said composition is selected from the group consisting of a powder, dust, pellet, granule, spray, emulsion, colloid, and solution.

18. A method for producing a polypeptide with pesticidal activity, comprising culturing the host cell of claim 8 under conditions in which the nucleic acid molecule encoding the polypeptide is expressed.

19. A plant having stably incorporated into its genome a DNA construct comprising a nucleotide sequence that encodes a protein having pesticidal activity, wherein said nucleotide sequence comprise
(a) a nucleotide sequence that encodes a polypeptide comprising the amino acid sequence of any one of SEQ ID NOs: 1, 2, 3, 4, 5, 6, 7, 8, 9, 10, 11, 12, 13, 14, 15, 16, 17, 18, 19, 20, 21, 22, 23, 24, 25, 26, 27, 28, 29, 30, 31, 32, 33, 34, 35, 36, 37, 38, 39, 40, 41, 42, 43, 44, 45, 46, 47, 48, 49, 50, 51, 52, 53, 54, 55, 56, 57, 58, 59, 60, 61, 62, 63, 64, 65, 66, 67, 68, 69, 70, 71, 72, 73, 74, 75, 76, 77, 78, 79, 80, 81, 82, 83, 84, 85, 86, 87, 88, 89, 90, 91, 92, 93, 94, 95, 96, 97, 98, 99, 100, 101, 102, 103, 104, 105, 106, 107, 108, 109, 110, 111, 112, 113, 114, 115, 116, 117, 118, 119, 120, 121, 122, 123, 124, 125, 126, 127, 128, 129, 130, 131, 132, 133, 134, 135, 136, 137, 138, 139, 140, 141, 142, 143, 144, 145, 146, 147, 148, 149, 150, 151, 152, 153, 154, 155, 156, 157, 158, 159, 160, 161, 162, 163, 164, 165, 166, 167, 168, 169, 170, 171, 172, 173, 174, 175, 176, 177, 178, 179, 180, 181, 182, 183, 184, 185, 186, 187, 188, 189, 190, 191, 192, 193, 194, 195, 196, 197, 198, 199, 200, 201, 202, 203, 204, 205, 206, 207, 208, 209, 210, 211, 212, 213, 214, 215, 216, 217, 218, 219, 220, 221, 222, 223, 224, 225, 226, 227, 228, 229, 230, 231, 232, 233, 234, 235, 236, 237, 238, 239, 240, 241, 242, 243, 244, 245, 246, 247, 248, 249, 250, 251, 252, 253, 254, 255, 256, 257, 258, 259, 260, 261, 262, 263, 264, 265, 266, 267, 268, 269, 270, 271, 272, 273, 274, 275, 276, 277, 278, 279, 280, 281, 282, 283, 284, 285, 286, 287, 288, 289, 290, 291, 292, 293, 294, 295, 296, 297, 298, 299, 300, 301, 302, 303, 304, 305, 306, 307, 308, 309, 310, 311, 312, 313, 314, 315, 316, 317, 318, 319, 320, 321, 322, 323, 324, 325, 326, 327, 328, 329, 330, 331, 332, 333, 334, 335, 336, 337, 338, 339, 340, 341, 342, 343, 344, 345, 346, 347, 348, 349, 350, 351, 352, 353, 354, 355, 356, 357, 358, 359, 360, 361, 362, 363, 364, 365, 366, 367, 368, 369, 370, 371, 372, 373, 374, 375, 376, 377, 378, 379, 380, 381, 382, 383, 384, 385, 386, 387, 388, 389, 390, 391, 392, and/or 393; or,
(b) a nucleotide sequence that encodes a polypeptide comprising an amino acid sequence having at least 90% percent sequence identity to an amino acid sequence selected from the group consisting of sequences set forth in SEQ ID NOs: 1, 2, 3, 4, 5, 6, 7, 8, 9, 10, 11, 12, 13, 14, 15, 16, 17, 18, 19, 20, 21, 22, 23, 24, 25, 26, 27, 28, 29, 30, 31, 32, 33, 34, 35, 36, 37, 38, 39, 40, 41, 42, 43, 44, 45, 46, 47, 48, 49, 50, 51, 52, 53, 54, 55, 56, 57, 58, 59, 60, 61, 62, 63, 64, 65, 66, 67, 68, 69, 70, 71, 72, 73, 74, 75, 76, 77, 78, 79, 80, 81, 82, 83, 84, 85, 86, 87, 88, 89, 90, 91, 92, 93, 94, 95, 96, 97, 98, 99, 100, 101, 102, 103, 104, 105, 106, 107, 108, 109, 110, 111, 112, 113, 114, 115, 116, 117, 118, 119, 120, 121, 122, 123, 124, 125, 126, 127, 128, 129, 130, 131, 132, 133, 134, 135, 136, 137, 138, 139, 140, 141, 142, 143, 144, 145, 146, 147, 148, 149, 150, 151, 152, 153, 154, 155, 156, 157, 158, 159, 160, 161, 162, 163, 164, 165, 166, 167, 168, 169, 170, 171, 172, 173, 174, 175, 176, 177, 178, 179, 180, 181, 182, 183, 184, 185, 186, 187, 188, 189, 190, 191, 192, 193, 194, 195, 196, 197, 198, 199, 200, 201, 202, 203, 204, 205, 206, 207, 208, 209, 210, 211, 212, 213, 214, 215, 216, 217, 218, 219, 220, 221, 222, 223, 224, 225, 226, 227, 228, 229, 230, 231, 232, 233, 234, 235, 236, 237, 238, 239, 240, 241, 242, 243, 244, 245, 246, 247, 248, 249, 250, 251, 252, 253, 254, 255, 256, 257, 258, 259, 260, 261, 262, 263, 264, 265, 266, 267, 268, 269, 270, 271, 272, 273, 274, 275, 276, 277, 278, 279, 280, 281, 282, 283, 284, 285, 286, 287, 288, 289, 290, 291, 292, 293, 294, 295, 296, 297, 298, 299, 300, 301, 302, 303, 304, 305, 306, 307, 308, 309, 310, 311, 312, 313, 314, 315, 316, 317, 318, 319, 320, 321, 322, 323, 324, 325, 326, 327, 328, 329, 330, 331, 332, 333, 334, 335, 336, 337, 338, 339, 340, 341, 342, 343, 344, 345, 346, 347, 348, 349, 350, 351, 352, 353, 354, 355, 356, 357, 358, 359, 360, 361, 362, 363, 364, 365, 366, 367, 368, 369, 370, 371, 372, 373, 374, 375, 376, 377, 378, 379, 380, 381, 382, 383, 384, 385, 386, 387, 388, 389, 390, 391, 392, and 393.

20. A transgenic seed of the plant of claim 19.

21. A method for protecting a plant from an insect pest, comprising expressing in a plant or cell thereof a nucleotide sequence that encodes a pesticidal polypeptide, wherein said nucleotide sequence comprises
(a) a nucleotide sequence that encodes a polypeptide comprising the amino acid sequence of any one of SEQ ID NOs: 1, 2, 3, 4, 5, 6, 7, 8, 9, 10, 11, 12, 13, 14, 15, 16, 17, 18, 19, 20, 21, 22, 23, 24, 25, 26, 27, 28, 29, 30, 31, 32, 33, 34, 35, 36, 37, 38, 39, 40, 41, 42, 43, 44, 45, 46, 47, 48, 49, 50, 51, 52, 53, 54, 55, 56, 57, 58, 59, 60, 61, 62, 63, 64, 65, 66, 67, 68, 69, 70, 71, 72, 73, 74, 75, 76, 77, 78, 79, 80, 81, 82, 83, 84, 85, 86, 87, 88, 89, 90, 91, 92, 93, 94, 95, 96, 97, 98, 99, 100, 101, 102, 103, 104, 105, 106, 107, 108, 109, 110, 111, 112, 113, 114, 115, 116, 117, 118, 119, 120, 121, 122, 123, 124, 125, 126, 127, 128, 129, 130, 131, 132, 133, 134, 135, 136, 137, 138, 139, 140, 141, 142, 143, 144, 145, 146, 147, 148, 149, 150, 151, 152, 153, 154, 155, 156, 157, 158, 159, 160, 161, 162, 163, 164, 165, 166, 167, 168, 169, 170, 171, 172, 173, 174, 175, 176, 177, 178, 179, 180, 181, 182, 183, 184, 185, 186, 187, 188, 189, 190, 191, 192, 193, 194, 195, 196, 197, 198, 199, 200, 201, 202, 203, 204, 205, 206, 207, 208, 209, 210, 211, 212, 213, 214, 215, 216, 217, 218, 219, 220, 221, 222, 223, 224, 225, 226, 227, 228, 229, 230, 231, 232, 233, 234, 235, 236, 237, 238, 239, 240, 241, 242, 243, 244, 245, 246, 247, 248, 249, 250, 251, 252, 253, 254, 255, 256, 257, 258, 259, 260, 261, 262, 263, 264, 265, 266, 267, 268, 269, 270, 271, 272, 273, 274, 275, 276, 277, 278, 279, 280, 281, 282, 283, 284, 285, 286, 287, 288, 289, 290, 291, 292, 293, 294, 295, 296, 297, 298, 299, 300, 301, 302, 303, 304, 305, 306, 307, 308, 309, 310, 311, 312, 313, 314, 315, 316, 317, 318, 319, 320, 321, 322, 323, 324, 325, 326, 327, 328, 329, 330, 331, 332, 333, 334, 335, 336, 337, 338, 339, 340, 341, 342, 343, 344, 345, 346, 347, 348, 349, 350, 351, 352, 353, 354, 355, 356, 357, 358, 359, 360, 361, 362, 363, 364, 365, 366, 367, 368, 369, 370, 371, 372, 373, 374, 375, 376, 377, 378, 379, 380, 381, 382, 383, 384, 385, 386, 387, 388, 389, 390, 391, 392, and/or 393; or,
(b) a nucleotide sequence that encodes a polypeptide comprising an amino acid sequence having at least 90% percent sequence identity to an amino acid sequence selected from the group consisting of sequences set forth in SEQ ID NOs: 1, 2, 3, 4, 5, 6, 7, 8, 9, 10, 11, 12, 13, 14, 15, 16, 17, 18, 19, 20, 21, 22, 23, 24, 25, 26, 27, 28, 29, 30, 31, 32, 33, 34, 35, 36, 37, 38, 39, 40, 41, 42, 43, 44, 45, 46, 47, 48, 49, 50, 51, 52, 53, 54, 55, 56, 57, 58, 59, 60, 61, 62, 63, 64, 65, 66, 67, 68, 69, 70, 71, 72, 73, 74, 75, 76, 77, 78, 79, 80, 81, 82, 83, 84, 85, 86, 87, 88, 89, 90, 91, 92, 93, 94, 95, 96, 97, 98, 99, 100, 101, 102, 103, 104, 105, 106, 107, 108, 109, 110, 111, 112, 113, 114, 115, 116, 117, 118, 119, 120, 121, 122, 123, 124, 125, 126, 127, 128, 129, 130, 131, 132, 133, 134, 135, 136, 137, 138, 139, 140, 141, 142, 143, 144, 145, 146, 147, 148, 149, 150, 151, 152, 153, 154, 155, 156, 157, 158, 159, 160, 161, 162, 163, 164, 165, 166, 167, 168, 169, 170, 171, 172, 173, 174, 175, 176, 177, 178, 179, 180, 181, 182, 183, 184, 185, 186, 187, 188, 189, 190, 191, 192, 193, 194, 195, 196, 197, 198, 199, 200, 201, 202, 203, 204, 205, 206, 207, 208, 209, 210, 211, 212, 213, 214, 215, 216, 217, 218, 219, 220, 221, 222, 223, 224, 225, 226, 227, 228, 229, 230, 231, 232, 233, 234, 235, 236, 237, 238, 239, 240, 241, 242, 243, 244, 245, 246, 247, 248, 249, 250, 251, 252, 253, 254, 255, 256, 257, 258, 259, 260, 261, 262, 263, 264, 265, 266, 267, 268, 269, 270, 271, 272, 273, 274, 275, 276, 277, 278, 279, 280, 281, 282, 283, 284, 285, 286, 287, 288, 289, 290, 291, 292, 293, 294, 295, 296, 297, 298, 299, 300, 301, 302, 303, 304, 305, 306, 307, 308, 309, 310, 311, 312, 313, 314, 315, 316, 317, 318, 319, 320, 321, 322, 323, 324, 325, 326, 327, 328, 329, 330, 331, 332, 333, 334, 335, 336, 337, 338, 339, 340, 341, 342, 343, 344, 345, 346, 347, 348, 349, 350, 351, 352, 353, 354, 355, 356, 357, 358, 359, 360, 361, 362, 363, 364, 365, 366, 367, 368, 369, 370, 371, 372, 373, 374, 375, 376, 377, 378, 379, 380, 381, 382, 383, 384, 385, 386, 387, 388, 389, 390, 391, 392, and 393.

22. The method of claim 21, wherein said plant produces a pesticidal polypeptide having pesticidal against a lepidopteran or coleopteran pest.

23. A method for increasing yield in a plant comprising growing in a field a plant or seed thereof having stably incorporated into its genome a DNA construct comprising a promoter that drives expression in a plant operably linked to a nucleotide sequence that encodes a pesticidal polypeptide, wherein said nucleotide sequence comprises
(a) a nucleotide sequence that encodes a polypeptide comprising the amino acid sequence of any one of SEQ ID NOs: 1, 2, 3, 4, 5, 6, 7, 8, 9, 10, 11, 12, 13, 14, 15, 16, 17, 18, 19, 20, 21, 22, 23, 24, 25, 26, 27, 28, 29, 30, 31, 32, 33, 34, 35, 36, 37, 38, 39, 40, 41, 42, 43, 44, 45, 46, 47, 48, 49, 50, 51, 52, 53, 54, 55, 56, 57, 58, 59, 60, 61, 62, 63, 64, 65, 66, 67, 68, 69, 70, 71, 72, 73, 74, 75, 76, 77, 78, 79, 80, 81, 82, 83, 84, 85, 86, 87, 88, 89, 90, 91, 92, 93, 94, 95, 96, 97, 98, 99, 100, 101, 102, 103, 104, 105, 106, 107, 108, 109, 110, 111, 112, 113, 114, 115, 116, 117, 118, 119, 120, 121, 122, 123, 124, 125, 126, 127, 128, 129, 130, 131, 132, 133, 134, 135, 136, 137, 138, 139, 140, 141, 142, 143, 144, 145, 146, 147, 148, 149, 150, 151, 152, 153, 154, 155, 156, 157, 158, 159, 160, 161, 162, 163, 164, 165, 166, 167, 168, 169, 170, 171, 172, 173, 174, 175, 176, 177, 178, 179, 180, 181, 182, 183, 184, 185, 186, 187, 188, 189, 190, 191, 192, 193, 194, 195, 196, 197, 198, 199, 200, 201, 202, 203, 204, 205, 206, 207, 208, 209, 210, 211, 212, 213, 214, 215, 216, 217, 218, 219, 220, 221, 222, 223, 224, 225, 226, 227, 228, 229, 230, 231, 232, 233, 234, 235, 236, 237, 238, 239, 240, 241, 242, 243, 244, 245, 246, 247, 248, 249, 250, 251, 252, 253, 254, 255, 256, 257, 258, 259, 260, 261, 262, 263, 264, 265, 266, 267, 268, 269, 270, 271, 272, 273, 274, 275, 276, 277, 278, 279, 280, 281, 282, 283, 284, 285, 286, 287, 288, 289, 290, 291, 292, 293, 294, 295, 296, 297, 298, 299, 300, 301, 302, 303, 304, 305, 306, 307, 308, 309, 310, 311, 312, 313, 314, 315, 316, 317, 318, 319, 320, 321, 322, 323, 324, 325, 326, 327, 328, 329, 330, 331, 332, 333, 334, 335, 336, 337, 338, 339, 340, 341, 342, 343, 344, 345, 346, 347, 348, 349, 350, 351, 352, 353, 354, 355, 356, 357, 358, 359, 360, 361, 362, 363, 364, 365, 366, 367, 368, 369, 370, 371, 372, 373, 374, 375, 376, 377, 378, 379, 380, 381, 382, 383, 384, 385, 386, 387, 388, 389, 390, 391, 392, and/or 393; or,
(b) a nucleotide sequence that encodes a polypeptide comprising an amino acid sequence having at least 90% percent sequence identity to an amino acid sequence selected from the group consisting of sequences set forth in SEQ ID NOs: 1, 2, 3, 4, 5, 6, 7, 8, 9, 10, 11, 12, 13, 14, 15, 16, 17, 18, 19, 20, 21, 22, 23, 24, 25, 26, 27, 28, 29, 30, 31, 32, 33, 34, 35, 36, 37, 38, 39, 40, 41, 42, 43, 44, 45, 46, 47, 48, 49, 50, 51, 52, 53, 54, 55, 56, 57, 58, 59, 60, 61, 62, 63, 64, 65, 66, 67, 68, 69, 70, 71, 72, 73, 74, 75, 76, 77, 78, 79, 80, 81, 82, 83, 84, 85, 86, 87, 88, 89, 90, 91, 92, 93, 94, 95, 96, 97, 98, 99, 100, 101, 102, 103, 104, 105, 106, 107, 108, 109, 110, 111, 112, 113, 114, 115, 116, 117, 118, 119, 120, 121, 122, 123, 124, 125, 126, 127, 128, 129, 130, 131, 132, 133, 134, 135, 136, 137, 138, 139, 140, 141, 142, 143, 144, 145, 146, 147, 148, 149, 150, 151, 152, 153, 154, 155, 156, 157, 158, 159, 160, 161, 162, 163, 164, 165, 166, 167, 168, 169, 170, 171, 172, 173, 174, 175, 176, 177, 178, 179, 180, 181, 182, 183, 184, 185, 186, 187, 188, 189, 190, 191, 192, 193, 194, 195, 196, 197, 198, 199, 200, 201, 202, 203, 204, 205, 206, 207, 208, 209, 210, 211, 212, 213, 214, 215, 216, 217, 218, 219, 220, 221, 222, 223, 224, 225, 226, 227, 228, 229, 230, 231, 232, 233, 234, 235, 236, 237, 238, 239, 240, 241, 242, 243, 244, 245, 246, 247, 248, 249, 250, 251, 252, 253, 254, 255, 256, 257, 258, 259, 260, 261, 262, 263, 264, 265, 266, 267, 268, 269, 270, 271, 272, 273, 274, 275, 276, 277, 278, 279, 280, 281, 282, 283, 284, 285, 286, 287, 288, 289, 290, 291, 292, 293, 294, 295, 296, 297, 298, 299, 300, 301, 302, 303, 304, 305, 306, 307, 308, 309, 310, 311, 312, 313, 314, 315, 316, 317, 318, 319, 320, 321, 322, 323, 324, 325, 326, 327, 328, 329, 330, 331, 332, 333, 334, 335, 336, 337, 338, 339, 340, 341, 342, 343, 344, 345, 346, 347, 348, 349, 350, 351, 352, 353, 354, 355, 356, 357, 358, 359, 360, 361, 362, 363, 364, 365, 366, 367, 368, 369, 370, 371, 372, 373, 374, 375, 376, 377, 378, 379, 380, 381, 382, 383, 384, 385, 386, 387, 388, 389, 390, 391, 392, and 393.

The application's sequence listing, which the Patent Office published only in electronic form, follows.

SEQUENCE LISTING (393 sequences)

SEQ ID NO: 1 - protein, 405 aa, Unknown
  source: /note="Description of Unknown: Organism from environmental sample"
MKSISKKVMAGLLVGATTLSIWAPASQAAELEKNRYYTLHLKNNIEKVWEVYNGWTSNDAGILLSKVNGKDNQQFVFFQLDGGTYAIVNKNSGKPVGLGGGINYTDGVRNMSNIAGNPAEALGQNDWTGADTDKWYLRDKGYGNYEVVNQGNGKVASYAATNIAPYFHYVDLDDSNPSDGDRLFKVSKSPWVYGDFPGLNLDYGTFSLPQLPATGNRPDAPNYTGGIDQQLPQTSNSVVVGASLIPCIMVKDSQASDYTKIHNSPYYTLIKEEYWDKTFSAVIPAGFTRNYTFKTGMTSVDQQKMTDTLSMKIGADFGLKFGDASASLKTEISRTIQTEITSTNSEASEETISSTVTSEPGKSQTGFTEYQLATKYTLKRADGSIVSDPWVVKNNKITIARKKSE

SEQ ID NO: 2 - protein, 378 aa, Artificial Sequence
  source: /note="Description of Artificial Sequence: Synthetic polypeptide"
MAELEKNRYYTLHLKNNIEKVWEVYNGWTSNDAGILLSKVNGKDNQQFVFFQLDGGTYAIVNKNSGKPVGLGGGINYTDGVRNMSNIAGNPAEALGQNDWTGADTDKWYLRDKGYGNYEVVNQGNGKVASYAATNIAPYFHYVDLDDSNPSDGDRLFKVSKSPWVYGDFPGLNLDYGTFSLPQLPATGNRPDAPNYTGGIDQQLPQTSNSVVVGASLIPCIMVKDSQASDYTKIHNSPYYTLIKEEYWDKTFSAVIPAGFTRNYTFKTGMTSVDQQKMTDTLSMKIGADFGLKFGDASASLKTEISRTIQTEITSTNSEASEETISSTVTSEPGKSQTGFTEYQLATKYTLKRADGSIVSDPWVVKNNKITIARKKSE

SEQ ID NO: 3 - protein, 325 aa, Bacillus sp.
MRKYKKLAVAMPLAGMIISGVGVLGGPASTFADTTPQDNKLSPRYMNLASTDHYQKFFDLLNKMNSEGNLGMEMVAIPDNNPKNINISEAHPDDSPENTTEVASYHNTTDIQQSLKTSSKKITYKNTLAIKNKGSISTNIESKTTFEVQVPFFAKGAEQLKVGLNITYNREHTDTEENTQEFTVPEQTLLAAPHGTTKLVYNVQSTKFSGTYNTKGIFKITANKKDKEKQEEEGYYYLKGLMKYMEDPFGGGDGSRAEFADLVQFDDVNTKAYIKDAEFTFEGKAGHESKAEVVFTPDDKTKPEVKMPIAEYNKRVANGISLYAK

SEQ ID NO: 4 - protein, 294 aa, Artificial Sequence
  source: /note="Description of Artificial Sequence: Synthetic polypeptide"
MDTTPQDNKLSPRYMNLASTDHYQKFFDLLNKMNSEGNLGMEMVAIPDNNPKNINISEAHPDDSPENTTEVASYHNTTDIQQSLKTSSKKITYKNTLAIKNKGSISTNIESKTTFEVQVPFFAKGAEQLKVGLNITYNREHTDTEENTQEFTVPEQTLLAAPHGTTKLVYNVQSTKFSGTYNTKGIFKITANKKDKEKQEEEGYYYLKGLMKYMEDPFGGGDGSRAEFADLVQFDDVNTKAYIKDAEFTFEGKAGHESKAEVVFTPDDKTKPEVKMPIAEYNKRVANGISLYAK

SEQ ID NO: 5 - protein, 302 aa, Bacillus sp.
MSKIVDIDQYLFGSILWPLEMPIECAVYPTLYSAVMHNELNIPPDNNYQNNRVVISNQELNYQLPPLSSQNVQPVIIIGGTFRNFTNETQIYESPEIVRTTSTVTKSSVTNGYKAGTKIGSSTTVKAEIPFVGGAETTLSMEFSFEADFSKTQETVKTDETSIRIPPQKISVAPGQIKRLEVELYKIAIPDATFKIDGDISGTVTAVQTFGKHVNIYDRFTDINRRCPNKYVNVDQDLRLDPNKKTLHFKGQGKAAFEVIAVEYEMRIITLDSKTGDIIHEEKAVRQLSSTKDVKPNENSNI

SEQ ID NO: 6 - protein, 390 aa, Bacillus sp.
LMSKGRGLIMSSKDIINIFSNYAKNWSQRENGGMSEISLVLPGFEEYALKPGLPIRTNYDDIHEEEKIISLTTTTIENPYDVEQEEYIILSSDVEEWGKWKFTDVATILGNHVVEVDVPNDLVIPPLGSMGKIPIRLLNEEVKHSGLRTWSVKHPFKLNPRTRVTATLQVKQKEIKRDFYVEKDLTGYLGVITEHLVDNSHMSLHQIKQILKCHYHPLIQVIDEGVTIKSKGTFLSLISLEAMIHIKVEHLDCPEMKEEYIIYNPQTGKTTVVIKDSTRGPQKHLISVVSSSAKPLSGQKYRSSGNFSIEASAIPSGTYALQWVVYSITPQSPSLHFGVARDVSGGSDPTLLAAVYSNDTTSVITGNNLYIGGPQYATAEFQVYVYALYQ

SEQ ID NO: 7 - protein, 381 aa, Artificial Sequence
  source: /note="Description of Artificial Sequence: Synthetic polypeptide"
MSSKDIINIFSNYAKNWSQRENGGMSEISLVLPGFEEYALKPGLPIRTNYDDIHEEEKIISLTTTTIENPYDVEQEEYIILSSDVEEWGKWKFTDVATILGNHVVEVDVPNDLVIPPLGSMGKIPIRLLNEEVKHSGLRTWSVKHPFKLNPRTRVTATLQVKQKEIKRDFYVEKDLTGYLGVITEHLVDNSHMSLHQIKQILKCHYHPLIQVIDEGVTIKSKGTFLSLISLEAMIHIKVEHLDCPEMKEEYIIYNPQTGKTTVVIKDSTRGPQKHLISVVSSSAKPLSGQKYRSSGNFSIEASAIPSGTYALQWVVYSITPQSPSLHFGVARDVSGGSDPTLLAAVYSNDTTSVITGNNLYIGGPQYATAEFQVYVYALYQ

SEQ ID NO: 8 - protein, 193 aa, Bacillus sp.
MDENGHKRGSFLHQNHEPLSFLPEELEHMESKPECCEEVNTKVPFCCMVQVPHGFQYVASSTPKIAYNLDCLSVVEEACRKTIQVEDCGPVEVKLNLLKVVGCIPYIANATVEGECGKECEYDVNGRHHISVCCSGSICIDNVLKCSTECLPHYTINCHHVNISNFSVKPVYDQGCEMLQFTGMIEFKHIPYE

SEQ ID NO: 9 - protein, 702 aa, Bacillus sp.
MNHNNNDIDYEIIDSHALSYSSNRNINDVRYPHLNNPNQPLKNTNYKNWIEICQQRQEYSENSPTLDTAETLAAVGASIIVAGTILGALAFPPLGAAGIISFGTLLPIIWGSGQNAKTVWQSFLTIGNRPFGSPVDPALINFLYLKVDGLRVQFEDFQRYFDIWSNNKTASNAGEVLRRFSSLDTDIIRELEQLKGNYYITLLPGYTQVANWHLLLLKYAAVYYDQWAPSSNLSIQSIYPQDYTSDLQTCLTNCARESNNKVNSLYYKCTLKCRIEEYTNYCSKTYQEGLNILKNSSGISWNVYNTYRREMTIAVLDFISIFSSYDPEKYPIATKPQLTREIYTDALLQETGIPGPISERELQLTRSAHLFTHLDVLQFYTQINSDFVPIVGLRGVQNFMSFIGGYTSYGPIHQPTNPPGFGVQVIRDSPLNFSGESNQIYKISVTQPRSDYRTESIDFNLINGSTRQYRAGHNPVEPRITNFEFPQFPANKIPPNGSKYSHVVSYVKVGPEDRSIFITQLSFAWTHTSVDFNNTISNKIITQIPAVKAYDISSDSKVVTGPNHTGGDLVELKNYLLIRLLVPQDSIGSYQVRIRYASNAPNQNIDLVAGFAQDHRLPQTFNHSNYNDLKYSDFQYATFPMPVTYRESQADTISLFGQSNNPNRLFIDKIEFIPIKGSALEYEGNQALEKAEKSVDNLFSNK

SEQ ID NO: 10 - protein, 675 aa, Artificial Sequence
  source: /note="Description of Artificial Sequence: Synthetic polypeptide"
MNHNNNDIDYEIIDSHALSYSSNRNINDVRYPHLNNPNQPLKNTNYKNWIEICQQRQEYSENSPTLDTAETLAAVGASIIVAGTILGALAFPPLGAAGIISFGTLLPIIWGSGQNAKTVWQSFLTIGNRPFGSPVDPALINFLYLKVDGLRVQFEDFQRYFDIWSNNKTASNAGEVLRRFSSLDTDIIRELEQLKGNYYITLLPGYTQVANWHLLLLKYAAVYYDQWAPSSNLSIQSIYPQDYTSDLQTCLTNCARESNNKVNSLYYKCTLKCRIEEYTNYCSKTYQEGLNILKNSSGISWNVYNTYRREMTIAVLDFISIFSSYDPEKYPIATKPQLTREIYTDALLQETGIPGPISERELQLTRSAHLFTHLDVLQFYTQINSDFVPIVGLRGVQNFMSFIGGYTSYGPIHQPTNPPGFGVQVIRDSPLNFSGESNQIYKISVTQPRSDYRTESIDFNLINGSTRQYRAGHNPVEPRITNFEFPQFPANKIPPNGSKYSHVVSYVKVGPEDRSIFITQLSFAWTHTSVDFNNTISNKIITQIPAVKAYDISSDSKVVTGPNHTGGDLVELKNYLLIRLLVPQDSIGSYQVRIRYASNAPNQNIDLVAGFAQDHRLPQTFNHSNYNDLKYSDFQYATFPMPVTYRESQADTISLFGQSNNPNRLFIDKIEFIPI

SEQ ID NO: 11 - protein, 370 aa, Unknown
  source: /note="Description of Unknown: Organism from environmental sample"
MKNRSSKVALCTLSALMISTIATPSMTAFAAEVTSPNLITKEESSTSSTISYIDIVQDRMKQRDIESKRTGKPINMQEQIIDGWFLARFWIFKDQNNNHQTNRFITWFKNNVASSKGYDSIAEQMGLKIEALSDMDISNVNYKSKLGDTIYNGISELTNYTGSVQKMKTDSFQRDYTKSQSTSVTNGLQVGFKVTAKSVITLAAGAGVDFETSVAYNLSSTTTETNTISDKFTVPSQEVTLPPGHKAIIKHDLRKMVYSGSHDLKGDLKVTFNDKELVQKFIYPNYRSIDLSGIRKAMIEIDKVNHVQPSDFYQLVGVKNHIKKGDTLYVDTPAEFNFNGANPYYRATFTEYDEDGNPVQTKPLTENYKI

SEQ ID NO: 12 - protein, 341 aa, Artificial Sequence
  source: /note="Description of Artificial Sequence: Synthetic polypeptide"
MAEVTSPNLITKEESSTSSTISYIDIVQDRMKQRDIESKRTGKPINMQEQIIDGWFLARFWIFKDQNNNHQTNRFITWFKNNVASSKGYDSIAEQMGLKIEALSDMDISNVNYKSKLGDTIYNGISELTNYTGSVQKMKTDSFQRDYTKSQSTSVTNGLQVGFKVTAKSVITLAAGAGVDFETSVAYNLSSTTTETNTISDKFTVPSQEVTLPPGHKAIIKHDLRKMVYSGSHDLKGDLKVTFNDKELVQKFIYPNYRSIDLSGIRKAMIEIDKVNHVQPSDFYQLVGVKNHIKKGDTLYVDTPAEFNFNGANPYYRATFTEYDEDGNPVQTKPLTENYKI

SEQ ID NO: 13 - protein, 297 aa, Bacillus sp.
MSTIIDIDQYLYATIDRSAIGGSLCNHFREQYQKVIYNEISIPDHYKNNRVTISNQKLDYQLPPLSSKNVEPLIIIGGTFKNETNDTQPFKSTEIKKESSTAISSSVTSGFKASTKIGSSTTVKAEIPFVGGGETSLSMEFSFETDFSKTTSVVTTDGTSILVPPQDIIVAPGQTKRLEVELYKVKIPEATFKIDGDVAGTISSQFATNENIYDRLANLINRNCPNVYVNTDGKLRLDDTKKTLHFKGQGKAAFEVMAVEYVMRIITLDNKTGATLNEETAVRQLSRTVEGKSSPIS

SEQ ID NO: 14 - protein, 384 aa, Pseudomonas sp.
LTAQIDPYTSITWKVTVMSEDRKPNIGPQDLAAVKDSPFLLSQQEWYAIQRYVMSVLQLPDDEKKMRKDLATGPAEKIPYIGPFDEFKDLLTGYQRIIPHVKNWKENIFPRTVQLAQDISNYATSARTYYSALIPPIDTLFLDPGNEAAKNRIASLCTKLAKEAKDNEDRATEVYKDISEFAQQTSDDEILLKNLFQQYEAKYGKHGALIAANKKEMDSLAAKIEQQNKEYEHACIVAETTPTYAWIVFWVALIVASIYGDKAAKLKHEIDVKKDRIKQLKDEEQRAIALMGTLNVALKGLVDIQDKIAAALPSIQKIKGVWNAIGSDLNKIGKIIKQDILEEADLKDLGVENAIAMWQECKLKSDSYQAHAFIDPPAQEEKTA

SEQ ID NO: 15 - protein, 367 aa, Artificial Sequence
  source: /note="Description of Artificial Sequence: Synthetic polypeptide"
MSEDRKPNIGPQDLAAVKDSPFLLSQQEWYAIQRYVMSVLQLPDDEKKMRKDLATGPAEKIPYIGPFDEFKDLLTGYQRIIPHVKNWKENIFPRTVQLAQDISNYATSARTYYSALIPPIDTLFLDPGNEAAKNRIASLCTKLAKEAKDNEDRATEVYKDISEFAQQTSDDEILLKNLFQQYEAKYGKHGALIAANKKEMDSLAAKIEQQNKEYEHACIVAETTPTYAWIVFWVALIVASIYGDKAAKLKHEIDVKKDRIKQLKDEEQRAIALMGTLNVALKGLVDIQDKIAAALPSIQKIKGVWNAIGSDLNKIGKIIKQDILEEADLKDLGVENAIAMWQECKLKSDSYQAHAFIDPPAQEEKTA

SEQ ID NO: 16 - protein, 382 aa, Bacillus sp.
MKSISKKVMAGLLVGATSLSIWAPASQAAPANNAYHSIHLAADAWLKWDVYGNGTYDEAGILLYNGNVSDNEQFLFFPLDGGAYAIVNKNSGKAVTIGGGWVGDNAFSYNREGLIQSKWTGAAANKWYLRDKGNNNYEIVNQGYGKVASYARLGITGPKYVDLDDSNPSDNDRLFHIPAAASSTFSLPTLPTIGTRPDAPNYTGGIDQQLPQTSNSVVVGASLLPCIMVNDSQASDYTKIHNSPYYTLVKEEYWDKTFSKVIQPGLSESYSYKTGVSSVDQQKMTDTLSMKFGADLGIKFGDVSASLKSEISRTIQTEISTTNSEATEETRSYTATGEPGKATGYTQYQLATKYTLKRADGSTVSDPWVVKNDKITVTRKTS

SEQ ID NO: 17 - protein, 355 aa, Artificial Sequence
  source: /note="Description of Artificial Sequence: Synthetic polypeptide"
MAPANNAYHSIHLAADAWLKWDVYGNGTYDEAGILLYNGNVSDNEQFLFFPLDGGAYAIVNKNSGKAVTIGGGWVGDNAFSYNREGLIQSKWTGAAANKWYLRDKGNNNYEIVNQGYGKVASYARLGITGPKYVDLDDSNPSDNDRLFHIPAAASSTFSLPTLPTIGTRPDAPNYTGGIDQQLPQTSNSVVVGASLLPCIMVNDSQASDYTKIHNSPYYTLVKEEYWDKTFSKVIQPGLSESYSYKTGVSSVDQQKMTDTLSMKFGADLGIKFGDVSASLKSEISRTIQTEISTTNSEATEETRSYTATGEPGKATGYTQYQLATKYTLKRADGSTVSDPWVVKNDKITVTRKTS

SEQ ID NO: 18 - protein, 277 aa, Bacillus sp.
MANISENPIDIIEICSTFANEWSMTHQGCAGTLFLLPHDDSTQGLDVSSDFTAEYDLPVEQTEVLTHSSFSFQNTSNAFTNQQVLVNITTPISESWELTHSVCPGGNDFFTITTPALPSIPGIPSNDSVQISDDVTATHSHTYTWDVNQNISLPPRSLTKVTFQTTIINVSRNFQFDFWMTGSIGVTSMNPINGSTETYFPITQVLQWYQSDLLTLNFEGNRVTCLNKGIYKAIYQNQPQLLIETTSLDNPTLIQNSILDLTTGSQTLVNESNGCCN

SEQ ID NO: 19 - protein, 310 aa, Bacillus sp.
MEITDVMQSARRYVDWDVVRNHYGRQDSIRFTPFNYRIRDSIAIPTTTTFDVKPTPEFTSFQILHNNSDSTQSQIVRISEKLTETTTHTTTQGYRLGGEITSTTTGSINANFILANVNIEQTIRLSITGEYNHSSTTSRTYTTERLWEISQPVNVPPFSRVVATLVVMKAQISIPIRLSTNIQGLGETPSFNNILFFANFQDFRNNPMFMGYEAAALADRRWPDRPSVFESGDMGGSLNLVGFGNSHTTPALYSIVRFEQLPLSGYSGETKTWYSDQIQLRDGRILTIPNFDPFNQIAINNDSLEINNLS

SEQ ID NO: 20 - protein, 645 aa, Bacillus sp.
MRKQLDVFKPDFKFFHPDLYLQRKNNRALMCDTSFTMGVNEVVKNSTIFAVSVIGATLSVAQPFVGATFATTSYILPVIWPSTGADSAQNFLCAAENLINEKLTFFVNEQAQSRFNGLKNTVDLFNTSTIHYINNPNSTNYTYVISQFTATNTTFAASMPLFQVRGYEVLLLPLFTQAANLYLLFLRDAIAFFKKYRSTLSNMQKISDLNTNRLKDLISEYTDYCVKIYHEGLQTMNDPKKQANLTDRLRYPWVKWKGFFFSQPDWNAHEGIESWNLMNDYRRTYTLTVLDFLPLWDTYSQPYFSFPGVRLSLTRELYTAARGKSTFHSQTPHMRTRKEIEKAIVRPPHLVTWLEDATINLRNYKQYPLSGVDTLHYLSGYLNKVQYNTLGFPGSMSCSIYDYPILKNEMVLNDEGYVGNIKFFNQTNELINQCGNPSANNFIFIHSIPDSKEAESSFSSEFLNTLSDIRGGIPYQNEFYNDDSNGHLDYISLAWLHPSLDRFNTLLVDKVTQISAVRGNELLGEASVIKGPGSTGGDLIKLGEKGGIKIPITLPNNVQQYTLRIRCAHKNEKGLLQIETDFRDTIIYIPYNPNFDESLHYNSFQLIDASKDFIIIPENKYLTLSLYNLGPEIILDKIELIPYLS

SEQ ID NO: 21 - protein, 382 aa, Unknown
  source: /note="Description of Unknown: Organism from environmental sample"
MMKFNRRNENNAKFNNGKISTFGFDLPEESTKFQTIGSVLSTNGRILNATRYREGDKLGQDVGDFCRTVTVDNQVTNEPVGDSMGGQFIFFKKDYGGYIIANRQYGEVLESVAENAASLITAPYTNKKQQEFGKFVYDDGKFRIYGDDGSITTCGDKWNSWTRITMSGSNANEARYVFQYGSTFPITIPKKLEPTTLGPIPELTNLDDVGTPPEPALVGTALLPCIFVNDRTPSQRIQDSPYYILECYDYWKLMKSGVIQPGGTEFWWEETGMHSDVQAAMKNMINISIGADKRLRFFNLSEPFRQTIVGDINILASNLNSDLSHISLLNDHTNSYSTRLRFAKYFVARKFVLKKINQSSPVHTWEYIDDTSYVMKEYRSSI

SEQ ID NO: 22 - protein, 492 aa, Bacillus sp.
MKKPNKFSVVIPVVSVLTIGSILPITSFAAETNGLPHAKTNQTHRMHSKIGADSKIHSPKKSKNKAGAGISASTDTKAGTDTSASTDIKAGTDTSASTDIKAGTDTSASTDIKAGTDTSASTDIKAGTDTGASADIKAGTDTSASTDIKAGTDTGASADIKAGTDTNVNTHIKTRTDTSTNTDSVPAIDMEQFKRDLITANEYMPPEPQSDGSRKSYLPGHLTNPATIDVTPSLENFKDVTATETKDITTADETQEATYENTTDLNQTHVTPSKTITNTDSFTYSNIEGAKLGIELDHTFTANVAIPDIGGAGQSTTEKVSTEFSYSHTSSNTTIHTEEIALPSQTIVAAPHGTTHYLGKVQRVEFSGKTEGSGYLTGTIDTEQYFTYLGEEGHWNGRADDPRNVKEKLDIYDVFKKALTNQAYSGLPNYIELDNVNKRVILKQPITSTFTGKLGFKADAKIEFIPSDPNKPKVQMSLTDYQNPEKRAQLLK

SEQ ID NO: 23 - protein, 464 aa, Artificial Sequence
  source: /note="Description of Artificial Sequence: Synthetic polypeptide"
MAETNGLPHAKTNQTHRMHSKIGADSKIHSPKKSKNKAGAGISASTDTKAGTDTSASTDIKAGTDTSASTDIKAGTDTSASTDIKAGTDTSASTDIKAGTDTGASADIKAGTDTSASTDIKAGTDTGASADIKAGTDTNVNTHIKTRTDTSTNTDSVPAIDMEQFKRDLITANEYMPPEPQSDGSRKSYLPGHLTNPATIDVTPSLENFKDVTATETKDITTADETQEATYENTTDLNQTHVTPSKTITNTDSFTYSNIEGAKLGIELDHTFTANVAIPDIGGAGQSTTEKVSTEFSYSHTSSNTTIHTEEIALPSQTIVAAPHGTTHYLGKVQRVEFSGKTEGSGYLTGTIDTEQYFTYLGEEGHWNGRADDPRNVKEKLDIYDVFKKALTNQAYSGLPNYIELDNVNKRVILKQPITSTFTGKLGFKADAKIEFIPSDPNKPKVQMSLTDYQNPEKRAQLLK

SEQ ID NO: 24 - protein, 815 aa, Bacillus sp.
MDSFNPKNNYPYQDIQNKIKTTSKIYPKLYSSLNYQPSSPPQASPFFARASQQCEIDNLEQLLRTSIITASGLIWALAGFIPIAGDTIAAIGGVVNVLLPGIWSEDTNQQISTVAKLIDTKVDSYAIERADKELEGLKKVMEEYRDAVQIFQQNMKPRSVAAEGVRTQFRILHTAMQQAMPTFRIKNFEVQLLPTYAQVANSHLLILKEIINDGKKYEFDAATIESYYNDFERSIRQYTNHCVDTYKLGLDKKATEQANLSAICYPWTTNAYAQFVTYQGIEDLNIILAYKRMMTLLVLDYVALWPSYDPREYPNLNGVKTSLTREIYTNVRGALQIWVEYIPDFPYKDDHVFGIDQAWFIAQYIIRRPHLFQKLENIILEYNEKYTPAKYELLPGDIFPTLVSPEKREPWTLTGMNRFSLSAIPSQLFESFIGKKDKYTCQLIAPINTVKSWYSGLDGFGRIECLTKTMESIRDRKCGVKRDVNTDMEFIDEIPFEYTKGCPPHQLCWINAGASGSDAREKNRINYMGCTWMHPSVDSENILSNRKITQIPAVMAQHLNANASVITGPGSTGGDLVKLQPNGSLTITFTIPKGLEVCSIRFRCVNTSKYDAVGLNLNMRINNVTVFDTGTLFFENDFYASDLPYQSFQLMNLGEVRLREHSATTQKCTLHLSTSEDSPDLLLDKIEFLPKFPAEPIDTTSSISSIARQYRLVKWEDGKHNYIKGAYFMVPDAVMDLEDMESLRYQLEIKSVQLKMILPARFVEHNKKEKTYNIYIDFTLFTKGDELPDSMRSFKIYAVDPMKDLVKATILDTTQ

SEQ ID NO: 25 - protein, 691 aa, Artificial Sequence
  source: /note="Description of Artificial Sequence: Synthetic polypeptide"
MDSFNPKNNYPYQDIQNKIKTTSKIYPKLYSSLNYQPSSPPQASPFFARASQQCEIDNLEQLLRTSIITASGLIWALAGFIPIAGDTIAAIGGVVNVLLPGIWSEDTNQQISTVAKLIDTKVDSYAIERADKELEGLKKVMEEYRDAVQIFQQNMKPRSVAAEGVRTQFRILHTAMQQAMPTFRIKNFEVQLLPTYAQVANSHLLILKEIINDGKKYEFDAATIESYYNDFERSIRQYTNHCVDTYKLGLDKKATEQANLSAICYPWTTNAYAQFVTYQGIEDLNIILAYKRMMTLLVLDYVALWPSYDPREYPNLNGVKTSLTREIYTNVRGALQIWVEYIPDFPYKDDHVFGIDQAWFIAQYIIRRPHLFQKLENIILEYNEKYTPAKYELLPGDIFPTLVSPEKREPWTLTGMNRFSLSAIPSQLFESFIGKKDKYTCQLIAPINTVKSWYSGLDGFGRIECLTKTMESIRDRKCGVKRDVNTDMEFIDEIPFEYTKGCPPHQLCWINAGASGSDAREKNRINYMGCTWMHPSVDSENILSNRKITQIPAVMAQHLNANASVITGPGSTGGDLVKLQPNGSLTITFTIPKGLEVCSIRFRCVNTSKYDAVGLNLNMRINNVTVFDTGTLFFENDFYASDLPYQSFQLMNLGEVRLREHSATTQKCTLHLSTSEDSPDLLLDKIEFLPK

SEQ ID NO: 26 - protein, 959 aa, Bacillus sp.
MSSNTMVPYNVLRNLDMPTISGTRWNKEMFTNALNNTSSLLTLIEKGINDGDDVLGLLSFIGLTALEAIPVVGGVLSSLVSMLFFPTKSSIDFKKIWAHLEKAINQIVDKKIEEALMSQLMQEIAGLANVLKEYRDAYDSYNGKKVFDIPDRLTPEEYLVQIFTSANLLFIQRIPIFQNPKYDVLFLPFFVHVAEMHILLIRDAAIHGLEWGMDEEIHQKFKKNLKEIIDQYTSYLLKTYNKGLKEVSERELNDKDFPTTNNKNHYINTVRWNVINQYKRGMTLTVFDFAYKWKYYQEIYQNNIELNPFRTIYSDIAGSVYPYEKATNEIDTIIKDYNLKYRGIFKRLQVNHAERIDSIQSSYIQNHEIIDSERTGGTGGKGSVLDIESPVKNPLIQVNMWSELVPISLGFKFYNKKEKNIGGGSWWPNPHKFGAYQYVGNKVSSIMGFGKNATGGFNSLDAMVIGFKQDDYIPENRCVGINKNGEPVTKVIDAGNFHQEKFQSNIKMFDEPMFGDGVLQFENYSNNLNKDSYVTYQIDAKIEGTYELHAIIGAKKTKDKVAFKMSLNEQQPENFITDSFDDGDIWDGMSLSEGIVYKRILVGRFQLKKGMNHISIHNGALQTSANIKTWNLAALELTITADSLNDPDITTLYDKDNYTGTKKFIFEDTKRLTDFNDKTSAIKVASDMAGFRVYQDYDHKGKSLDLVGGEKLSLKNHSFNNKISSVKFADMVLYHNYNYVGTKELVFDDVPELKGSNDKTSSIVVSSNVLGARLFEHANYKGKYMDVIGGQKLNLKNHELDKKISSIQFVKGDNKILNGIYQIITAINNTSVIDKHLQNPDVHLWENAGNKNQKWRVEYDRTKKAYLIENIWHKGSVLTNFGNALVYCLPYDGNLYQYWTFEYVGNDYYIIRNKFNSDLVLDVNNADPNNGTIIKLNQQHDLNSSNINAQKFKFNDVNN

SEQ ID NO: 27 - protein, 814 aa, Artificial Sequence
  source: /note="Description of Artificial Sequence: Synthetic polypeptide"
MSSNTMVPYNVLRNLDMPTISGTRWNKEMFTNALNNTSSLLTLIEKGINDGDDVLGLLSFIGLTALEAIPVVGGVLSSLVSMLFFPTKSSIDFKKIWAHLEKAINQIVDKKIEEALMSQLMQEIAGLANVLKEYRDAYDSYNGKKVFDIPDRLTPEEYLVQIFTSANLLFIQRIPIFQNPKYDVLFLPFFVHVAEMHILLIRDAAIHGLEWGMDEEIHQKFKKNLKEIIDQYTSYLLKTYNKGLKEVSERELNDKDFPTTNNKNHYINTVRWNVINQYKRGMTLTVFDFAYKWKYYQEIYQNNIELNPFRTIYSDIAGSVYPYEKATNEIDTIIKDYNLKYRGIFKRLQVNHAERIDSIQSSYIQNHEIIDSERTGGTGGKGSVLDIESPVKNPLIQVNMWSELVPISLGFKFYNKKEKNIGGGSWWPNPHKFGAYQYVGNKVSSIMGFGKNATGGFNSLDAMVIGFKQDDYIPENRCVGINKNGEPVTKVIDAGNFHQEKFQSNIKMFDEPMFGDGVLQFENYSNNLNKDSYVTYQIDAKIEGTYELHAIIGAKKTKDKVAFKMSLNEQQPENFITDSFDDGDIWDGMSLSEGIVYKRILVGRFQLKKGMNHISIHNGALQTSANIKTWNLAALELTITADSLNDPDITTLYDKDNYTGTKKFIFEDTKRLTDFNDKTSAIKVASDMAGFRVYQDYDHKGKSLDLVGGEKLSLKNHSFNNKISSVKFADMVLYHNYNYVGTKELVFDDVPELKGSNDKTSSIVVSSNVLGARLFEHANYKGKYMDVIGGQKLNLKNHELDKKISSIQFVKGDN

SEQ ID NO: 28 - protein, 641 aa, Artificial Sequence
  source: /note="Description of Artificial Sequence: Synthetic polypeptide"
MSSNTMVPYNVLRNLDMPTISGTRWNKEMFTNALNNTSSLLTLIEKGINDGDDVLGLLSFIGLTALEAIPVVGGVLSSLVSMLFFPTKSSIDFKKIWAHLEKAINQIVDKKIEEALMSQLMQEIAGLANVLKEYRDAYDSYNGKKVFDIPDRLTPEEYLVQIFTSANLLFIQRIPIFQNPKYDVLFLPFFVHVAEMHILLIRDAAIHGLEWGMDEEIHQKFKKNLKEIIDQYTSYLLKTYNKGLKEVSERELNDKDFPTTNNKNHYINTVRWNVINQYKRGMTLTVFDFAYKWKYYQEIYQNNIELNPFRTIYSDIAGSVYPYEKATNEIDTIIKDYNLKYRGIFKRLQVNHAERIDSIQSSYIQNHEIIDSERTGGTGGKGSVLDIESPVKNPLIQVNMWSELVPISLGFKFYNKKEKNIGGGSWWPNPHKFGAYQYVGNKVSSIMGFGKNATGGFNSLDAMVIGFKQDDYIPENRCVGINKNGEPVTKVIDAGNFHQEKFQSNIKMFDEPMFGDGVLQFENYSNNLNKDSYVTYQIDAKIEGTYELHAIIGAKKTKDKVAFKMSLNEQQPENFITDSFDDGDIWDGMSLSEGIVYKRILVGRFQLKKGMNHISIHNGALQTSANIKTWNLAALELTITA

SEQ ID NO: 29 - protein, 332 aa, Bacillus sp.
MLEMKQYKKLVMILPLTGMLWGGGLLIDTNTSFASSLGQQSYKDYDNFDDPYRVDLSSRILRALSARDHEAYDIDGVDKYNAKWDWQFQYVDGQINTDATVDSYTDSGEIELLNYRNDTNVNQNHQTVEKTVKTTENFTYSNSGGAKLGLDVEAKLGVTVPFIADGGLKVTAKTEFSYNHTSSNAVTKETMYKFPSQTIVCQAGYITRYVGKVQRANFSGIFSGKAAATGNLEVYVINSEGERVFKTISIYDIYKYTKNDMPLQNGVEFDEEKKRVIIPWNIESTYTGRGGHNAIVNVTVTPINNQGAARTLSLRNYLDKIKDGTLDEFMSK

SEQ ID NO: 30 - protein, 329 aa, Artificial Sequence
  source: /note="Description of Artificial Sequence: Synthetic polypeptide"
MKQYKKLVMILPLTGMLWGGGLLIDTNTSFASSLGQQSYKDYDNFDDPYRVDLSSRILRALSARDHEAYDIDGVDKYNAKWDWQFQYVDGQINTDATVDSYTDSGEIELLNYRNDTNVNQNHQTVEKTVKTTENFTYSNSGGAKLGLDVEAKLGVTVPFIADGGLKVTAKTEFSYNHTSSNAVTKETMYKFPSQTIVCQAGYITRYVGKVQRANFSGIFSGKAAATGNLEVYVINSEGERVFKTISIYDIYKYTKNDMPLQNGVEFDEEKKRVIIPWNIESTYTGRGGHNAIVNVTVTPINNQGAARTLSLRNYLDKIKDGTLDEFMSK

SEQ ID NO: 31 - protein, 166 aa, Unknown
  source: /note="Description of Unknown: Organism from environmental sample"
LVDLSLTNIPFWPPKSTEVKSHNEHKDKSMNTTVDKAKNVVSWNIFVYLSASEDQINFNEIFSITDPNIVPQAFAMAQVFQQALVPTADGKSLRFDVQQAITLIKKPPEMAVINFTDQVVEQSNSAVTVMVDKVLEILNKVLGVVLGAGPKAKLIESVSSAFTNLN

SEQ ID NO: 32 - protein, 166 aa, Artificial Sequence
  source: /note="Description of Artificial Sequence: Synthetic polypeptide"
MVDLSLTNIPFWPPKSTEVKSHNEHKDKSMNTTVDKAKNVVSWNIFVYLSASEDQINFNEIFSITDPNIVPQAFAMAQVFQQALVPTADGKSLRFDVQQAITLIKKPPEMAVINFTDQVVEQSNSAVTVMVDKVLEILNKVLGVVLGAGPKAKLIESVSSAFTNLN

SEQ ID NO: 33 - protein, 386 aa, Unknown
  source: /note="Description of Unknown: Organism from environmental sample"
MEKESRYMLKRNKLIFSGMTALTVIGSGMTLSIPTAFANTQDNNNFLQSIQEQEFTDENGQIITPGNFASISPYWLIGDSNNELYNFYNEVKQRIFDKKNKEQNMLKLDEYLNDLWFVGAVSQLYETPNDHNKRLEASNLVRWYKNNNTAKPNFEILESKLDNVEPILDITEPIGYFATDSEYTNNSPHMGEYLIPGWSNSTSTTYTTTTTQGFSIGANGDIKISLPFLDKLGLTGSYNFSKTDTSTTTDSTTLTIPVQTIKVSPFSHSKTSFYFQTHQYRAKFDVTAKFKAEVGRDAEYTRKRSAFYLLAKYHDYLPKGIIVENGGKLTLEGKGEISVPNHINGFKLVKETKETPLSGTEKEKIITESYTKNPNTNAFNPEIEKP

SEQ ID NO: 34 - protein, 349 aa, Artificial Sequence
  source: /note="Description of Artificial Sequence: Synthetic polypeptide"
MNTQDNNNFLQSIQEQEFTDENGQIITPGNFASISPYWLIGDSNNELYNFYNEVKQRIFDKKNKEQNMLKLDEYLNDLWFVGAVSQLYETPNDHNKRLEASNLVRWYKNNNTAKPNFEILESKLDNVEPILDITEPIGYFATDSEYTNNSPHMGEYLIPGWSNSTSTTYTTTTTQGFSIGANGDIKISLPFLDKLGLTGSYNFSKTDTSTTTDSTTLTIPVQTIKVSPFSHSKTSFYFQTHQYRAKFDVTAKFKAEVGRDAEYTRKRSAFYLLAKYHDYLPKGIIVENGGKLTLEGKGEISVPNHINGFKLVKETKETPLSGTEKEKIITESYTKNPNTNAFNPEIEKP

SEQ ID NO: 35 - protein, 828 aa, Bacillus sp.
LNFHCTRSTRKTTNKGDFMTKKQKKILSMTLATGVFAGTYIPTAYTAFAETEQKEDLKENQTKDINQNSLQIDSYGWFENPYKGVTFSQFIDAFNNNQWQPLLVNIKNKGDAGSGTISFLKGMMTTGLSLLPPPASLLASIWSVFIPTNDANGTDMWRQLETYIDERIDGKINDYHKYLMGAEFNGAMSAIKEYQRVLQIYNDSKNSLKRVEEPGTPVIEAVRAADRKLKEFIAVIQTPEKSTDSVYQQITAPIFVQAANAHLLLQRDMILYGEEWGMDKDQWQGYKDNQKKIIQEYTNYAMKVYNDGLEKRKKEAEQINTQQPNRNTDRWNHINDYVREYTLSVLDFVALFPATNPETYSKGVMQENSRQIYSSIKGAVIPQGGTGEGTTWENIQKTLDSQVYKGDLHKLDIRSYDRIDAIQPWYSDKQNGGSNWTTPGWTGNATGGTLKTLINPLDNPITRVKAQSSRTPNYIDFKFDTGGDNPYFGRYVSGHVSYKEDIFEYPNQKLSQIHAFNRSTYPGFEGIDAVVFGFVDKNLNQSSTYLMTNMITTIPAAKYNRGMSNFQPQVESIHAKQKAMKTDTTNSYLAYGIEVSKEQQYKIRYKVAANENSKISLSHRKPGGNYAKIADTTIPITGNAADTVKGEYGSYKIVEGPTIKLTKGAHDLKLENSQGKLSLDQIELEPVEQDLVIVQDNFDNQRLNWINLGGIVNGGITGKAGMIGTNGDTWTYIQDQVLPFSKYTLSIKVKLDSNDGNERQKVTIFTDNLKHERITKTVELKGKAGYQEIQLDFITSRDLANTHVGILTSNGTSNVLFDDVKVIGAKKD

SEQ ID NO: 36 - protein, 810 aa, Artificial Sequence
  source: /note="Description of Artificial Sequence: Synthetic polypeptide"
MTKKQKKILSMTLATGVFAGTYIPTAYTAFAETEQKEDLKENQTKDINQNSLQIDSYGWFENPYKGVTFSQFIDAFNNNQWQPLLVNIKNKGDAGSGTISFLKGMMTTGLSLLPPPASLLASIWSVFIPTNDANGTDMWRQLETYIDERIDGKINDYHKYLMGAEFNGAMSAIKEYQRVLQIYNDSKNSLKRVEEPGTPVIEAVRAADRKLKEFIAVIQTPEKSTDSVYQQITAPIFVQAANAHLLLQRDMILYGEEWGMDKDQWQGYKDNQKKIIQEYTNYAMKVYNDGLEKRKKEAEQINTQQPNRNTDRWNHINDYVREYTLSVLDFVALFPATNPETYSKGVMQENSRQIYSSIKGAVIPQGGTGEGTTWENIQKTLDSQVYKGDLHKLDIRSYDRIDAIQPWYSDKQNGGSNWTTPGWTGNATGGTLKTLINPLDNPITRVKAQSSRTPNYIDFKFDTGGDNPYFGRYVSGHVSYKEDIFEYPNQKLSQIHAFNRSTYPGFEGIDAVVFGFVDKNLNQSSTYLMTNMITTIPAAKYNRGMSNFQPQVESIHAKQKAMKTDTTNSYLAYGIEVSKEQQYKIRYKVAANENSKISLSHRKPGGNYAKIADTTIPITGNAADTVKGEYGSYKIVEGPTIKLTKGAHDLKLENSQGKLSLDQIELEPVEQDLVIVQDNFDNQRLNWINLGGIVNGGITGKAGMIGTNGDTWTYIQDQVLPFSKYTLSIKVKLDSNDGNERQKVTIFTDNLKHERITKTVELKGKAGYQEIQLDFITSRDLANTHVGILTSNGTSNVLFDDVKVIGAKKD

SEQ ID NO: 37 - protein, 669 aa, Artificial Sequence
  source: /note="Description of Artificial Sequence: Synthetic polypeptide"
MTKKQKKILSMTLATGVFAGTYIPTAYTAFAETEQKEDLKENQTKDINQNSLQIDSYGWFENPYKGVTFSQFIDAFNNNQWQPLLVNIKNKGDAGSGTISFLKGMMTTGLSLLPPPASLLASIWSVFIPTNDANGTDMWRQLETYIDERIDGKINDYHKYLMGAEFNGAMSAIKEYQRVLQIYNDSKNSLKRVEEPGTPVIEAVRAADRKLKEFIAVIQTPEKSTDSVYQQITAPIFVQAANAHLLLQRDMILYGEEWGMDKDQWQGYKDNQKKIIQEYTNYAMKVYNDGLEKRKKEAEQINTQQPNRNTDRWNHINDYVREYTLSVLDFVALFPATNPETYSKGVMQENSRQIYSSIKGAVIPQGGTGEGTTWENIQKTLDSQVYKGDLHKLDIRSYDRIDAIQPWYSDKQNGGSNWTTPGWTGNATGGTLKTLINPLDNPITRVKAQSSRTPNYIDFKFDTGGDNPYFGRYVSGHVSYKEDIFEYPNQKLSQIHAFNRSTYPGFEGIDAVVFGFVDKNLNQSSTYLMTNMITTIPAAKYNRGMSNFQPQVESIHAKQKAMKTDTTNSYLAYGIEVSKEQQYKIRYKVAANENSKISLSHRKPGGNYAKIADTTIPITGNAADTVKGEYGSYKIVEGPTIKLTKGAHDLKLENSQGKLSLDQIELEPV

SEQ ID NO: 38 - protein, 780 aa, Artificial Sequence
  source: /note="Description of Artificial Sequence: Synthetic polypeptide"
METEQKEDLKENQTKDINQNSLQIDSYGWFENPYKGVTFSQFIDAFNNNQWQPLLVNIKNKGDAGSGTISFLKGMMTTGLSLLPPPASLLASIWSVFIPTNDANGTDMWRQLETYIDERIDGKINDYHKYLMGAEFNGAMSAIKEYQRVLQIYNDSKNSLKRVEEPGTPVIEAVRAADRKLKEFIAVIQTPEKSTDSVYQQITAPIFVQAANAHLLLQRDMILYGEEWGMDKDQWQGYKDNQKKIIQEYTNYAMKVYNDGLEKRKKEAEQINTQQPNRNTDRWNHINDYVREYTLSVLDFVALFPATNPETYSKGVMQENSRQIYSSIKGAVIPQGGTGEGTTWENIQKTLDSQVYKGDLHKLDIRSYDRIDAIQPWYSDKQNGGSNWTTPGWTGNATGGTLKTLINPLDNPITRVKAQSSRTPNYIDFKFDTGGDNPYFGRYVSGHVSYKEDIFEYPNQKLSQIHAFNRSTYPGFEGIDAVVFGFVDKNLNQSSTYLMTNMITTIPAAKYNRGMSNFQPQVESIHAKQKAMKTDTTNSYLAYGIEVSKEQQYKIRYKVAANENSKISLSHRKPGGNYAKIADTTIPITGNAADTVKGEYGSYKIVEGPTIKLTKGAHDLKLENSQGKLSLDQIELEPVEQDLVIVQDNFDNQRLNWINLGGIVNGGITGKAGMIGTNGDTWTYIQDQVLPFSKYTLSIKVKLDSNDGNERQKVTIFTDNLKHERITKTVELKGKAGYQEIQLDFITSRDLANTHVGILTSNGTSNVLFDDVKVIGAKKD

SEQ ID NO: 39 - protein, 639 aa, Artificial Sequence
  source: /note="Description of Artificial Sequence: Synthetic polypeptide"
METEQKEDLKENQTKDINQNSLQIDSYGWFENPYKGVTFSQFIDAFNNNQWQPLLVNIKNKGDAGSGTISFLKGMMTTGLSLLPPPASLLASIWSVFIPTNDANGTDMWRQLETYIDERIDGKINDYHKYLMGAEFNGAMSAIKEYQRVLQIYNDSKNSLKRVEEPGTPVIEAVRAADRKLKEFIAVIQTPEKSTDSVYQQITAPIFVQAANAHLLLQRDMILYGEEWGMDKDQWQGYKDNQKKIIQEYTNYAMKVYNDGLEKRKKEAEQINTQQPNRNTDRWNHINDYVREYTLSVLDFVALFPATNPETYSKGVMQENSRQIYSSIKGAVIPQGGTGEGTTWENIQKTLDSQVYKGDLHKLDIRSYDRIDAIQPWYSDKQNGGSNWTTPGWTGNATGGTLKTLINPLDNPITRVKAQSSRTPNYIDFKFDTGGDNPYFGRYVSGHVSYKEDIFEYPNQKLSQIHAFNRSTYPGFEGIDAVVFGFVDKNLNQSSTYLMTNMITTIPAAKYNRGMSNFQPQVESIHAKQKAMKTDTTNSYLAYGIEVSKEQQYKIRYKVAANENSKISLSHRKPGGNYAKIADTTIPITGNAADTVKGEYGSYKIVEGPTIKLTKGAHDLKLENSQGKLSLDQIELEPV

SEQ ID NO: 40 - protein, 582 aa, Bacillus sp.
MKYKDRAHTKRKYKQALLATAATMTLGVSTLASTSSAFAAENSISSQQAPSTSTTTNDVFKIEKDGTIKILKDQLFTTDTLKAIGSLGGSVLKQAYTDAHTNNGNFNNTFRTLTMGATALIPYGGVVISPLIGLLWPENVDAQKNQIKKMMEELATMMDQKIEDYDLGTLKQQTKALMKELQSFEDSINGKPLAKSPTAGSIEETRRTNALIINTKFKDIIQLCQKEDQKIAELPIFTIIATAHLEFLHFMEKNGQSSKIQFDAESLETQFTNDIPKFAEDYIHHVQQTYKLGEQQFNKKMYDVATNTPSSNVSRNINNTSEEEIIGRMQKYISDLHPLTNGYGDKIKQMQDALANYKKLRDDRNQYYKNTSNNKAFQVAAIGDWKQENNKWYFIDTKKEKKTNWLQLGDKWYYLNPENNDIKNSAGVTFKPGEMITGKIDINGKTYFFKPDTGEMATGWAKDGDKYYYLSPTDNNKNWDAKQGRDTANGGATFNKGEMMYGWLDLDHYYYASPTDGATNAYQNGKTFSKGEMWTGWLENPVKPNEWYYMRKEAKFNQPVGSMMHDETTPDGYKIDENGKSR

SEQ ID NO: 41 - protein, 544 aa, Artificial Sequence
  source: /note="Description of Artificial Sequence: Synthetic polypeptide"
MAENSISSQQAPSTSTTTNDVFKIEKDGTIKILKDQLFTTDTLKAIGSLGGSVLKQAYTDAHTNNGNFNNTFRTLTMGATALIPYGGVVISPLIGLLWPENVDAQKNQIKKMMEELATMMDQKIEDYDLGTLKQQTKALMKELQSFEDSINGKPLAKSPTAGSIEETRRTNALIINTKFKDIIQLCQKEDQKIAELPIFTIIATAHLEFLHFMEKNGQSSKIQFDAESLETQFTNDIPKFAEDYIHHVQQTYKLGEQQFNKKMYDVATNTPSSNVSRNINNTSEEEIIGRMQKYISDLHPLTNGYGDKIKQMQDALANYKKLRDDRNQYYKNTSNNKAFQVAAIGDWKQENNKWYFIDTKKEKKTNWLQLGDKWYYLNPENNDIKNSAGVTFKPGEMITGKIDINGKTYFFKPDTGEMATGWAKDGDKYYYLSPTDNNKNWDAKQGRDTANGGATFNKGEMMYGWLDLDHYYYASPTDGATNAYQNGKTFSKGEMWTGWLENPVKPNEWYYMRKEAKFNQPVGSMMHDETTPDGYKIDENGKSR

SEQ ID NO: 42 - protein, 276 aa, Bacillus sp.
MAVNHQHGDLDLTRIFSTFANQWSMNNQGCAGTLFYLIDDKSIQEFSYSNEFAIVYDAPVEQVKINPLSTLSYQNITNSFTDQSVLFSIETPIIESWEETSCVCPGGTSFTNIPPPNRNVPGLPASDSASLTHDLVETHSFTNTWNINQSIRLPPRSSTKVTFQTKLKEVKQNFEITFWLTGHIGVLSMHPINGNTEHYFPITEILQQVDSNQFTLDMEVNKVTAFVTGIYKATYQVEPQLLIQTQNLDNPTIVQESILDLNTGNKILVNKSNGCC

SEQ ID NO: 43 - protein, 207 aa, Unknown
  source: /note="Description of Unknown: Organism from environmental sample"
LIKSCTLVIFNFSFVPGASFSYKQTSGMTTTDQKTVSNTVSHTFGADVGLNFENQQIGKRTTSAALSYQYTSELSVQESRTNTELNVIEEEFIIKNENTHSVAWTKYILVSEYSVKRADDTIVNEPWTVRDCWVRSQRDEFRSRAKNLGADFKIHFVDVPEEVLFERLEARNVMLSEGAFFIPKAKLKEWIQIFEPPSPEELETSAD

SEQ ID NO: 44 - protein, 185 aa, Artificial Sequence
  source: /note="Description of Artificial Sequence: Synthetic polypeptide"
MQTSGMTTTDQKTVSNTVSHTFGADVGLNFENQQIGKRTTSAALSYQYTSELSVQESRTNTELNVIEEEFIIKNENTHSVAWTKYILVSEYSVKRADDTIVNEPWTVRDCWVRSQRDEFRSRAKNLGADFKIHFVDVPEEVLFERLEARNVMLSEGAFFIPKAKLKEWIQIFEPPSPEELETSAD

SEQ ID NO: 45 - protein, 318 aa, Unknown
  source: /note="Description of Unknown: Organism from environmental sample"
MKKLGFGIIAGAIASIGIAGTAPSYALAAENTPINVNENVKVGITDVQSEVKKVGEYYYANNYAGKKVEHRRYEHKPDSIETSLDFKVTGNVNNLTFDNVIVEYIGENEFTNNTNETQKFTTAKYTKSITETIATATTSGFNVGGSSNLFKIPIVLNNGLTVNAAFNSSTTQTQTEAEQKTIEASAQTIEVPPHKKYKAEVVLEQRNYKGDVGFKGHTIFPYTNIKATASYTAPNGMIDSKKYSFGAWTGQYYSTLTTDQKKSIKGLTFKEIPEASLKVLEVNGTGKVNGIFGSKLTVNFYDITDKSNPRLVETRNFE

SEQ ID NO: 46 - protein, 291 aa, Artificial Sequence
  source: /note="Description of Artificial Sequence: Synthetic polypeptide"
MAENTPINVNENVKVGITDVQSEVKKVGEYYYANNYAGKKVEHRRYEHKPDSIETSLDFKVTGNVNNLTFDNVIVEYIGENEFTNNTNETQKFTTAKYTKSITETIATATTSGFNVGGSSNLFKIPIVLNNGLTVNAAFNSSTTQTQTEAEQKTIEASAQTIEVPPHKKYKAEVVLEQRNYKGDVGFKGHTIFPYTNIKATASYTAPNGMIDSKKYSFGAWTGQYYSTLTTDQKKSIKGLTFKEIPEASLKVLEVNGTGKVNGIFGSKLTVNFYDITDKSNPRLVETRNFE

SEQ ID NO: 47 - protein, 391 aa, Unknown
  source: /note="Description of Unknown: Organism from environmental sample"
MNVYKKIKKTVPFAVLSTAILLSPAATTFAAEKTQPENLTVQAKNMDGDGGGIGGGQHSGDHGGSIGTGDTGNQDTRGSFDEAQLKKDLADRLIPAMVNKPELFSFGASTHPTADELTNEFKVKFTGATIAGGGYTNSGTIDTEAKVENYTDGGQVELLSYRNDTPVNQSFNTPERSVKDTESFTYSNQEGVKLGVASETKVGVEIPFVAEGDETIKISSEFSYNHTSSNTSSHEETTTFKSQPVVCQSGYTTQYVGQVQNAIFSGSFTGTVAVGGDVTYDITTMLGQQHQDTARLVDSDLKGHAIYYIFKYSGMPVPSYAHLDDANRTVLIDNVRSTYEGVGGHHSKVVVKVFPNTRSSEDAVTMPYAEYMQKVQDGTLQKELEQHFKQA

SEQ ID NO: 48 - protein, 362 aa, Artificial Sequence
  source: /note="Description of Artificial Sequence: Synthetic polypeptide"
MAEKTQPENLTVQAKNMDGDGGGIGGGQHSGDHGGSIGTGDTGNQDTRGSFDEAQLKKDLADRLIPAMVNKPELFSFGASTHPTADELTNEFKVKFTGATIAGGGYTNSGTIDTEAKVENYTDGGQVELLSYRNDTPVNQSFNTPERSVKDTESFTYSNQEGVKLGVASETKVGVEIPFVAEGDETIKISSEFSYNHTSSNTSSHEETTTFKSQPVVCQSGYTTQYVGQVQNAIFSGSFTGTVAVGGDVTYDITTMLGQQHQDTARLVDSDLKGHAIYYIFKYSGMPVPSYAHLDDANRTVLIDNVRSTYEGVGGHHSKVVVKVFPNTRSSEDAVTMPYAEYMQKVQDGTLQKELEQHFKQA

SEQ ID NO: 49 - protein, 353 aa, Unknown
  source: /note="Description of Unknown: Organism from environmental sample"
LLYKFYTIKKGASNMLKNNKKTKQILSLAMIGVIGTSFAFASPNSASAASTPQVNPIAAGQENPYIENWDEPFKKMFNMLQNNVEQYKNYKNPQFVLNKVVKTSVEEDGSPITNAKTLFVGKTVFRNSTDRDQTFTTNEFSKTIEHSVSSSTTHGFNLGVTASASFGIPVIGETSVEISTEYNFSNTNETTKTESYTYTASPQNIVVPAHSAVEVSVILNTVKIDGNVDLTSTITGTVNYEDGSRKRNNNLQNLWYDAFRYSNTETSAFNVKPVYEYSDGLYDKVTLKGKGKYSAEYGTQFSVSVKPIVEQPRALAVQSDGTVAENGKSTDEDYTTANEGYTYTVEPEVKKGQ

SEQ ID NO: 50 - protein, 339 aa, Artificial Sequence
  source: /note="Description of Artificial Sequence: Synthetic polypeptide"
MLKNNKKTKQILSLAMIGVIGTSFAFASPNSASAASTPQVNPIAAGQENPYIENWDEPFKKMFNMLQNNVEQYKNYKNPQFVLNKVVKTSVEEDGSPITNAKTLFVGKTVFRNSTDRDQTFTTNEFSKTIEHSVSSSTTHGFNLGVTASASFGIPVIGETSVEISTEYNFSNTNETTKTESYTYTASPQNIVVPAHSAVEVSVILNTVKIDGNVDLTSTITGTVNYEDGSRKRNNNLQNLWYDAFRYSNTETSAFNVKPVYEYSDGLYDKVTLKGKGKYSAEYGTQFSVSVKPIVEQPRALAVQSDGTVAENGKSTDEDYTTANEGYTYTVEPEVKKGQ

SEQ ID NO: 51 - protein, 306 aa, Artificial Sequence
  source: /note="Description of Artificial Sequence: Synthetic polypeptide"
MASTPQVNPIAAGQENPYIENWDEPFKKMFNMLQNNVEQYKNYKNPQFVLNKVVKTSVEEDGSPITNAKTLFVGKTVFRNSTDRDQTFTTNEFSKTIEHSVSSSTTHGFNLGVTASASFGIPVIGETSVEISTEYNFSNTNETTKTESYTYTASPQNIVVPAHSAVEVSVILNTVKIDGNVDLTSTITGTVNYEDGSRKRNNNLQNLWYDAFRYSNTETSAFNVKPVYEYSDGLYDKVTLKGKGKYSAEYGTQFSVSVKPIVEQPRALAVQSDGTVAENGKSTDEDYTTANEGYTYTVEPEVKKGQ

SEQ ID NO: 52 - protein, 680 aa, Unknown
  source: /note="Description of Unknown: Organism from environmental sample"
VKNMNSYQNKNEYKILDTSRNSSNMPTRYPRYPLAKDPQASMQNTNYKEWLNMCDSNTQFVGDISTYSSPEAALSIRDAVLTGINSVGTILSNLGVPLASQSFGIISRLIGILWTAPDPFEALMVLVEELINQRITDRIRENALRELEGLQGIMRLYQTRLQTWLVNKNDDNRRALVTQYAIVDNFFEQNMPKFRESNYEILLLPVYAQAANLHLILLRDADYFGEEWKLGSDEIRDNYIRLQRLIREYKDHCVTFYNQGLNQFNRSTAQDWVSFNRFRTNMTLTVLDLATLFPNYDPRRYPSAVKTELTREVYTDPVGYTERNLPWYNPNKTTFATMENRARRSPSYTTWLNRIFVYTGHLGNFSAVRNVWGGHTLIENGNDDSEITHNFGDPASITPIQYLNFKNVSVFSIDSIAHVLSLGTQPYLESQYGISKVTFHTSDVNNVPGSLIYEVDNVNQFQPILSELPGRDEQRPNARDFSHRLSYISNFNAQRGSGSSGYVSLLTYGWTHTSMDRNNRLESDGITQIDAVKGFGDDLVIPGPTGGNLVRLSDRGGRGYLLRVQAPEKSTSYRIRLRYACLANFGDAIVVEHSGSSHIVSFFDCSNAPGRPSNTLEESDFRYIDVPGTFTPSINPEIRFRTNSFDGPNALDKIEFIPLNIFANQSLEKRKKAVNDLFIN

SEQ ID NO: 53 - protein, 677 aa, Artificial Sequence
  source: /note="Description of Artificial Sequence: Synthetic polypeptide"
MNSYQNKNEYKILDTSRNSSNMPTRYPRYPLAKDPQASMQNTNYKEWLNMCDSNTQFVGDISTYSSPEAALSIRDAVLTGINSVGTILSNLGVPLASQSFGIISRLIGILWTAPDPFEALMVLVEELINQRITDRIRENALRELEGLQGIMRLYQTRLQTWLVNKNDDNRRALVTQYAIVDNFFEQNMPKFRESNYEILLLPVYAQAANLHLILLRDADYFGEEWKLGSDEIRDNYIRLQRLIREYKDHCVTFYNQGLNQFNRSTAQDWVSFNRFRTNMTLTVLDLATLFPNYDPRRYPSAVKTELTREVYTDPVGYTERNLPWYNPNKTTFATMENRARRSPSYTTWLNRIFVYTGHLGNFSAVRNVWGGHTLIENGNDDSEITHNFGDPASITPIQYLNFKNVSVFSIDSIAHVLSLGTQPYLESQYGISKVTFHTSDVNNVPGSLIYEVDNVNQFQPILSELPGRDEQRPNARDFSHRLSYISNFNAQRGSGSSGYVSLLTYGWTHTSMDRNNRLESDGITQIDAVKGFGDDLVIPGPTGGNLVRLSDRGGRGYLLRVQAPEKSTSYRIRLRYACLANFGDAIVVEHSGSSHIVSFFDCSNAPGRPSNTLEESDFRYIDVPGTFTPSINPEIRFRTNSFDGPNALDKIEFIPLNIFANQSLEKRKKAVNDLFIN

SEQ ID NO: 54 - protein, 310 aa, Bacillus sp.
MEIIDIEQSAIDYMKWYVLTYQKANPNTFCHTGIYPYEICNINSIPEITFYTVNPVQKIIGNQILENHTETAQSQTVRFSEKVIETINSTTTSGYKIGTGIKSISKINVQVNFMISGGFEQELKISFNSEYNHSTTITTTNTNEKLWEITQPINISPYSRVTVSLIAMTVDIKIPIKLSANIKGTHIYNNKNNWFSSISFQQYNGSKLSAIFSAGNLGQSSWPNKPLNFISPGLYSSFNLNGTSITNVNMGLYIKIKFVQNSLSGYLGETKTWYSDQIILRDGRIITLPNFNPLTGTCSTADVEIIIDDD

SEQ ID NO: 55 - protein, 322 aa, Bacillus sp.
MKNNNNNNKKKQILSLAMLASIGTSFGIISPDSVSAAQNSPIQNTIQEQRNVSISDWRKPLENTYKAMRLRDPIQYLSESPYLTLDGVYQSSVEADGSPIITNSNSLFVGRTTLTNYTDRDQTLTTNEFSKTFENSVTSSTTNGFNLGVSASSTFKIPLIGETSIELSTEYNFSNTNETTKTESYTYTATPQNIVVPANSSVEVIVNLNTAKLSGNVKLLSYLNGKIGYNSYKPYQVTSSWITVFLQSAGPSEIDSNLQIDPANQFKGVYLVGKGKYSAEYGTEFAVTVRPVEKPNKSSAKLSESTNEGYTYTVKPEVKKTN

SEQ ID NO: 56 - protein, 287 aa, Artificial Sequence
  source: /note="Description of Artificial Sequence: Synthetic polypeptide"
MAQNSPIQNTIQEQRNVSISDWRKPLENTYKAMRLRDPIQYLSESPYLTLDGVYQSSVEADGSPIITNSNSLFVGRTTLTNYTDRDQTLTTNEFSKTFENSVTSSTTNGFNLGVSASSTFKIPLIGETSIELSTEYNFSNTNETTKTESYTYTATPQNIVVPANSSVEVIVNLNTAKLSGNVKLLSYLNGKIGYNSYKPYQVTSSWITVFLQSAGPSEIDSNLQIDPANQFKGVYLVGKGKYSAEYGTEFAVTVRPVEKPNKSSAKLSESTNEGYTYTVKPEVKKTN

SEQ ID NO: 57 - protein, 301 aa, Bacillus sp.
MQKKVMLYSLLAGTLLGNVTLSTNVSAAEIAGNKNNIINTPASKSQKAMNDINQEAIQDIDQKVNKMIDSIPPIFGSKYTRTDRFYGESLTYSGINLKENNSTHVEPMYFGSNTFYNDTELEQSYNTTSFSEAVTKSTTTQTQNGFKAGVTTGGKAGIPFVAEGEVKINLEYNFTHTNSNTISKTTTLTAPPQAVKVPAGKVYKSDVYFEKKSTSGTVELYGDFLTGVVAEGRTTSIGSVLHKATDKQGLIQSPNDPNKVRAIGKGTFNVEHGSNFIVKTYDVTSGQKSAKLVDTKKIPIK

SEQ ID NO: 58 - protein, 275 aa, Artificial Sequence
  source: /note="Description of Artificial Sequence: Synthetic polypeptide"
MAEIAGNKNNIINTPASKSQKAMNDINQEAIQDIDQKVNKMIDSIPPIFGSKYTRTDRFYGESLTYSGINLKENNSTHVEPMYFGSNTFYNDTELEQSYNTTSFSEAVTKSTTTQTQNGFKAGVTTGGKAGIPFVAEGEVKINLEYNFTHTNSNTISKTTTLTAPPQAVKVPAGKVYKSDVYFEKKSTSGTVELYGDFLTGVVAEGRTTSIGSVLHKATDKQGLIQSPNDPNKVRAIGKGTFNVEHGSNFIVKTYDVTSGQKSAKLVDTKKIPIK

SEQ ID NO: 59 - protein, 245 aa, Bacillus sp.
LEHKLLQVYSVEQAVLFLPASKTYADQVSHIDKFIKNDTEGLYVKNIDGFYFPGALNDVVKWSTHDLFWKDAEIAPFFLIDDSKIDTIIQEVKNQKDMELTDLLEILTVHAPSQEMLLLSNTFENPTNATIKGTSGNISRQFTSTISANETNATTLGMKQTMKAGIDFFNIVKDEFSMEWNESYTYTNAHQTLTLEATTLTSGAMTVDVKPGEKYLIDTVMRRIKENGRFCCKVEKQQEDYRLGI

SEQ ID NO: 60 - protein, 235 aa, Artificial Sequence
  source: /note="Description of Artificial Sequence: Synthetic polypeptide"
MEQAVLFLPASKTYADQVSHIDKFIKNDTEGLYVKNIDGFYFPGALNDVVKWSTHDLFWKDAEIAPFFLIDDSKIDTIIQEVKNQKDMELTDLLEILTVHAPSQEMLLLSNTFENPTNATIKGTSGNISRQFTSTISANETNATTLGMKQTMKAGIDFFNIVKDEFSMEWNESYTYTNAHQTLTLEATTLTSGAMTVDVKPGEKYLIDTVMRRIKENGRFCCKVEKQQEDYRLGI

SEQ ID NO: 61 - protein, 353 aa, Bacillus sp.
MVKKDISARDLGGKEDAPFLLKKDEWIKIQKYTGDGAYLPVNVNEMRKALALENTAELPDFGELYTVNTSIKGHCKNWNDTTYREILDVANQIVNYSRRAEVFYAPLLDYLPDILEGDTVALEKFQKICKKLASEAEDFSDHAETLAKTVKQFADDTTNDYKNLINVKVKYDALYGKNSEEEIKLRAEVEKLREELEKYIEDYEDYESESWLSLLLGPVFGFILKGILDSTHGQMLKAKVDATKQKIEATCATIQRNVYLMSLLDKADVGTDKTQKQIEEALPVINKIKAIWSALHKDLLTLSTITMKDIHDDPEFADLGIELAIMQWVKVGKQADDFRINADVGFIVDQYIA

SEQ ID NO: 62 - protein, 946 aa, Bacillus sp.
MQLKNIYKCLTITALLAHIAVFPSSSVAEEAKTKKSSTPKTEQQQKNQRADVGLVGYYFVDDQFNESAFVQTGEKGKLLDTKKVKQDTSQIKSIRWEGNIKPSKTGEYILSTSSNKHVTMKINGETIIKQADMEKVMKLEKEKNYSITIEYHVPESGKDLQLFWEMSGEEKVQIPDNNILSPNFSETNQLQSRSGQQQSTSGDFDGDGIPDSLEENGYTFKDAAIVPWKDEYASQGYKKYTSNSRKAKTAADPYTDFEKVIGRMPEATKRDARDPLVAAYPSVGVGMEKFHFSKNENVQEGASGTKTKTVTDTSTTTHSVDVGGSIGWGEKGFSFSFSPKYTHSWSNSTSVANSESDTWSSQIGTNPSEAAYLNANVRYYNGGNAPIYDLRPTSNFVLQNSSESIATITANANTIGNSLGPSATYPAKGQAPISLTQANEAGTIKISVNSETLDKIQEGTETLNIETTQNRGQYGKIDEEGNQIPGGEWDPIRTNIDAVSGALTLNLGSGKENLERRVAAKDLRDPEDKTPELTIKEAIKKAFDVEEVGGRLLYKDANGKDIVLDESVVNIVTDENTKKEIDAQLANMPDKKVYNAKWKRGMKITLHIPEKYFDFEKSDTGFYYTYGESGGYTGSKRGRINAGGNGYSKENLQLNPYTSYTARAYVKSDSPNGLSDVMFYVDNQKGAGKGAKVNGKVNGQQWQTVEFSFNTGANPEYFSHIGFKNNGNAQLHFDDVSVTKWTETENIKIAHGVETWDAYFDAGSPNDAYIDQIKFSRIPNSKVRYQLRYNGTEWKPILPDSSVEDDGNQRILHIGQRTGGLSGPRANTRVEVYAVDEQDENLKVKIADNEMQAKLFPQYTLFFKKQIHNAYTFEIKTGPSAPTAMYKFKNNTKNKVYDLGSVGSNASRWVDWLNYSPEDEYSLIATVNEKEYVLFTEKGKNIPGDK

SEQ ID NO: 63 - protein, 317 aa, Bacillus sp.
MAITDIEQSAYDFMDWNAQFNHNGIPGTQYNRIIYPYVINDSVATPTTTEFEVTPVPVNAAIQILENHTETAQSQTVRFSERIIETVNNSTTEGYKIGGGIRSTTSVKVKVGFFLGGSIKQSIDLAFTGEYNHSSTRSLIQSHEQLWEVIQPVIVSPYSRIVATLIIMKTQLRIPIQLSSNIRGTHFQENSNSWFCGSSFQRYQQNNLTVLSTAAALANPIWPNKPSSFKSAGLNDSLNLIGSAYSDIGSGLYIIVRFDQTRLPGYSGETKTWYSDQIQLRNGGILTIPNFDPTTKIFSSNGIPISPEEAEGIEFTE

SEQ ID NO: 64 - protein, 295 aa, Bacillus sp.
MKKLLLGTLVTILGVVNLGYSELAFAEKSLIMYHNSNAIGYVEKSKEFLEKNKIFEFGLHSTSGLKINTDEIKDKIIDFSENDNRGNIYPQTVRSAIRTFKHTDSMTLNTSLQFSFGEELSGSIDLPMLAKITGKFSAQQIINAGVSKFSSNEESISYGGDVIEAHPNQLKKIEYIYKEHIYSGEINTGTPITGVGELVEIRTNNYRIPANGLKYADIYNYFEKIKSLNVTEDIRVYKRNLNNEQYSISYFTIPVGKFDNYFFIDDVSRMVSTVGNRALVNGISGIGLTIRTITM

SEQ ID NO: 65 - protein, 270 aa, Artificial Sequence
  source: /note="Description of Artificial Sequence: Synthetic polypeptide"
MEKSLIMYHNSNAIGYVEKSKEFLEKNKIFEFGLHSTSGLKINTDEIKDKIIDFSENDNRGNIYPQTVRSAIRTFKHTDSMTLNTSLQFSFGEELSGSIDLPMLAKITGKFSAQQIINAGVSKFSSNEESISYGGDVIEAHPNQLKKIEYIYKEHIYSGEINTGTPITGVGELVEIRTNNYRIPANGLKYADIYNYFEKIKSLNVTEDIRVYKRNLNNEQYSISYFTIPVGKFDNYFFIDDVSRMVSTVGNRALVNGISGIGLTIRTITM

SEQ ID NO: 66 - protein, 375 aa, Bacillus sp.
LRKRYKKLATIIPLTSMLSMSAIAVAPATSFAAETQKNEVSLQEGTAQGYLMENGKMTPVYKNKLTKFDTDGDIDPGLPLLPENPYNPIPDHGTAYVESTDIGDTVYFKPFDTPQNNVLALGDSDDNTSQWAVVVDSKKYKSVGYFVQKQADGQIRVGYYNPEDLSLITDSNYAFAGVPGFGLSAEAKAKMQQDLNRAYGDIWDGTSKLKRETNYKLLPNASGLQDDASAFGYNQTLTSGVSTTNMFGIATTVGWKMGIKVSVVPLVADVTSEISASLTASYQHTVNVSNQTSSQVKFDISRVDNPDYKYNDYAAAVYKIQTDYTLEPGKGLSRVVAKQDLKDPVRTAALANTNYAYEGSKYYFTVTPGSHKKSV

SEQ ID NO: 67 - protein, 344 aa, Artificial Sequence
  source: /note="Description of Artificial Sequence: Synthetic polypeptide"
MAETQKNEVSLQEGTAQGYLMENGKMTPVYKNKLTKFDTDGDIDPGLPLLPENPYNPIPDHGTAYVESTDIGDTVYFKPFDTPQNNVLALGDSDDNTSQWAVVVDSKKYKSVGYFVQKQADGQIRVGYYNPEDLSLITDSNYAFAGVPGFGLSAEAKAKMQQDLNRAYGDIWDGTSKLKRETNYKLLPNASGLQDDASAFGYNQTLTSGVSTTNMFGIATTVGWKMGIKVSVVPLVADVTSEISASLTASYQHTVNVSNQTSSQVKFDISRVDNPDYKYNDYAAAVYKIQTDYTLEPGKGLSRVVAKQDLKDPVRTAALANTNYAYEGSKYYFTVTPGSHKKSV

SEQ ID NO: 68 - protein, 974 aa, Bacillus sp.
MRKKKNDNVEHLQTRDFLEDSITNFDVYNAIIEQNYKDILRDVVEQNYTSATYPILKNISTGTIGMAGTIVGMIATGGVASIAKIGFSLLSTTFNIFLDVNKPSESATAVWEKIKKYAEEYVGKEFDANQFNRLMSELDGCKDSVALYLDYRKKADPAALYYCRSAIALFTQRISSFQQKGYEILSLPLFVQVARLHLLLYRDLVLYGASWDVSVEDRAKDKKMMKKLIKHYSEYAFITYLSGLEDMEQTKTEIGKSPCCDIEQKTILQNKVFPFTKHWNAINQYKQGMQLSVFDIVAQFPTLDPETYPLIGTNIKQSREVFSRITGALIKKEHLAESSKINVSTVEQIDNLLPLGYEGELIDVRTKVGKLIPPPGYGSIKYPLYSMDQVIDKVTGVAMWKSYKVASLKPTEETWYPANHIIPLDVVGSCCDTEHGLVNNFYAGSSMVAFSSEKIKCKINPDKHKLSSLTLLGAFKTWHDPGFPYESYGYMSTGLICGFRQSDLNPKHILSSSLITQIPAEMNANNGNKGFRNISENITGQNVMCARTNGSYLEYDVFGIENATTHCEIRLYLSYGGNRNSSIDIAVSHLEPNPLGCEWQMGKEQKKGNIPLEISALVENSIRGMNGYYSLTKKVPIILTEGRNKIKLAFKSDNDLNTVMIDRIEIIPVKIETEISGANGKVIFTVHQNGKLEATAMEENGEIPIDGANSQKSWKVFVCGQDKFDNKGESKELIFYGQEKPKDIASNFNRMFPEDTSEWVIPGNTLSVLDFTKDPILQETIPLRKYKDQKKILELVKVNDIKNEQLLMRKIATASEADLESEVGKAYSIFAGGKLVYQCKENTKFKTVMNAFNALNIRAYSARIMENNEKMNPKDTAEDMINDLYPRTDDNKPNYGNCIKPHIVSYDTRVAKNALRIMYKNKTPIPDNFYLNLKLAEEKTIIRENSQACLTEEKNIDTMLGLMRKDGTCVQGKN

SEQ ID NO: 69 - protein, 669 aa, Artificial Sequence
  source: /note="Description of Artificial Sequence: Synthetic polypeptide"
MRKKKNDNVEHLQTRDFLEDSITNFDVYNAIIEQNYKDILRDVVEQNYTSATYPILKNISTGTIGMAGTIVGMIATGGVASIAKIGFSLLSTTFNIFLDVNKPSESATAVWEKIKKYAEEYVGKEFDANQFNRLMSELDGCKDSVALYLDYRKKADPAALYYCRSAIALFTQRISSFQQKGYEILSLPLFVQVARLHLLLYRDLVLYGASWDVSVEDRAKDKKMMKKLIKHYSEYAFITYLSGLEDMEQTKTEIGKSPCCDIEQKTILQNKVFPFTKHWNAINQYKQGMQLSVFDIVAQFPTLDPETYPLIGTNIKQSREVFSRITGALIKKEHLAESSKINVSTVEQIDNLLPLGYEGELIDVRTKVGKLIPPPGYGSIKYPLYSMDQVIDKVTGVAMWKSYKVASLKPTEETWYPANHIIPLDVVGSCCDTEHGLVNNFYAGSSMVAFSSEKIKCKINPDKHKLSSLTLLGAFKTWHDPGFPYESYGYMSTGLICGFRQSDLNPKHILSSSLITQIPAEMNANNGNKGFRNISENITGQNVMCARTNGSYLEYDVFGIENATTHCEIRLYLSYGGNRNSSIDIAVSHLEPNPLGCEWQMGKEQKKGNIPLEISALVENSIRGMNGYYSLTKKVPIILTEGRNKIKLAFKSDNDLNTVMIDRIEIIPV

SEQ ID NO: 70 - protein, 276 aa, Bacillus sp.
MAIINIWDEVDKYAIRFCQQRGLTYSGKKGSVDQYPLVMKNIIVTTPNSTVSTPSHPAFSHVLYYNNNTSLPQTEILEYHESITESTSTTTTTGVTTGVSIESTQSFDIKFVEVGLTQRITTEVNTTNSTTETTQKERRMGVTTTIAIPPFKRVEATVIGLEGPYDLITKITCDISGFIYFEATNGTRFLSSIYQVLRTNNTPNFTFTFEDPEDPTCHFNGSGSLKGNVGLKTFVDVKEFPLPGQGGESRQYIIPGTTVNTLGIISPGIVQIPVFN

SEQ ID NO: 71 - protein, 918 aa, Bacillus sp.
MQNTISSKVDQVTVIGLVGFYFKDTAFKDLMFIQVGEKSNLMDKSRIDTVSQQIHSVRWMGNLIPPQTGVYKLSTSFNTNVIMQINGETVINQSNIEKSLQLEKDKLYEIKIEYRDTADTLSDLQLFWSIGDAKREQIPEKYIISPNFSEKENVLAEKEATPFFPEYNLFDRQQENGQKQSISAPIDSDNDGIPDEWEEKGYTFKDNRIVAWDDSFSEEGYKKYVSNPNSNRTAKDPYTDFEKVTGHMPAATRDEARDPLVAAYPAVGVGMEKLLFSKNADVSEGASGTKSKSVTKTETNTKTVELGAEFGFDKDGFSFSFSPKYTESWSNSTSVENTESESWSKQININLAESAYLNANVRYYNAGTAPIYALQPTSNFVLQNSGKSITTIIAGTNQIGNSLGPGDTYPKKEQAPISLDKANEAGSVKITINAEQLDELQNGTETLNLETTQNKGQYATLNETGVPVTDPSKQWDPIRTDIDAISGSLTLNLGTGKESLERRVAAKNVNDPEDKTPEITIKEAIKKAFDAKEKASRLYYKDRNGKDICIDESAINLIGDENTKKEIEIQLSQMQDKKIYNAKWKRGMKITLHIPTAYYDFESESDWCDTSYGTGEGYSGTRYGDIGTTGNGWANLPPLKPYTSYTARAYMRTASATGNNDVEFYVSNNSVAGQGVRVSGKVLGNQWKLVEISFNTFASPEYFKSIGFKNTGNANLHFDDVSVTEWKTNEDIQKRHVFGAWFTAGSIVMGGVFNRVPSTTVRYQWNINGNLGSILPAIPADNNGKRIVLSSQPFTPNDSAELYAIDEHNDNLKVKVVEHVPLGTGHEVDRWNAGDKYINGMTFKKVPNRELRYQLAIDGKFTSIMPAGATDAQGRRYINFLEFNSGYGISIFKRIEVYAVDDKINDLRVLVAKHSIFG

SEQ ID NO: 72 - protein, 678 aa, Bacillus sp.
MNQNSNNNEIMDTGSQPRHPLAQAPVSEFQGMNTCSTGEQSSSVRQQAAVTDAALQTTSEVTQTLINAGNTAGTLGLSSWEIAGGILSSIIKILWKATANQKKWEEMIGAVEILIKKALDKQLHETAIAQLEGLQDVVNRYIKALDDLHANPTNPVLQEEVRIRWDDADTAFITAMPQFRPGATGGDSQILLLAVYAQAANLHLLLLRDAVQFGAQWGMDSATIKTNYGQLLERQNQYSNYCVNTYDSGLKQSRNLQADLSNYDQYPWTRDNQSAYSSYRDAKGEYQGTENWNLYNKFRKEMTLMALDITSFWSLYNPYNYPLPVKTELTRELFTDIRGTTWRKDNNLNTIDGIEARMVGNRNEHLFTWLKQLYIYMKYKGKDSDTTHGNLMVGLEKTVQTTLGPDQKFPVEGQNTNYDSIERPGVIITDYYWNVAETKQWFETRQLTLRVSTGILSADMGTVNYELWDRSHTGYREYIYGASHRSNSIKDHRLSWVKFEPVYQGCPFVWSNERQLSALLFGWTHNSVDPNNSIASDKITQIPAVKGYYVENGATVVRGPGSTGGNLIKLPTNQAEIQLRIAVRPSSSARNRSYTIRIRYASESNADLSVGIYYESQGVWRSERFLAEKTFSGNMAYSSFGYLNTINFNAIEEEFKIGLSCYRDGGPVFIDQIEFIPS

SEQ ID NO: 73 - protein, 326 aa, Brevibacillus sp.
MKEKMNKNRLKKPMVAIMLATSIGIPCLSASGSALAAENTPTSVNENVRAGITDVQSELKKIGNYHYSNNIAGTKIESWPTLTFKNNPDSVETKGNFSITGTVNKLNFDSAIVEYVGENVFENTTNETQKFSTAKYTKSVTESIATATTKGFKVGGSGDGSNIFTIPLLLNNGIKINGEFNSSTTETQTKSETKTIEASAQTVEVPPHKKYKADVVLEQRNFWGDVTFTGVWSNPVTTIKATASYWAPNGMGAWKEYTFSDKTQNYWKGLTTSQKNSINGIKFENSNVKAEGTAKVEGIFGSMLNVKIYDITDKSNPKLVETRSFK

SEQ ID NO: 74 - protein, 291 aa, Artificial Sequence
  source: /note="Description of Artificial Sequence: Synthetic polypeptide"
MAENTPTSVNENVRAGITDVQSELKKIGNYHYSNNIAGTKIESWPTLTFKNNPDSVETKGNFSITGTVNKLNFDSAIVEYVGENVFENTTNETQKFSTAKYTKSVTESIATATTKGFKVGGSGDGSNIFTIPLLLNNGIKINGEFNSSTTETQTKSETKTIEASAQTVEVPPHKKYKADVVLEQRNFWGDVTFTGVWSNPVTTIKATASYWAPNGMGAWKEYTFSDKTQNYWKGLTTSQKNSINGIKFENSNVKAEGTAKVEGIFGSMLNVKIYDITDKSNPKLVETRSFK

SEQ ID NO: 75 - protein, 522 aa, Bacillus sp.
MVTWQEIRKEWTKEYENSLSAKDSVSMMKKTGVAAIKLINNPRDYNEVFKALTMSALDLVPIGGIFISTIVGLVWPKSENDNKIEKMLEDLRKNMTNIINESIETQYITNISIEYRLLNNELEDLAKLTNDEPGSSSIGTRRNQAEAIRRHFRSIIEYAEHKDHKVAALPQYTLAVVNYMTFLQFMQKNGIKKFEYKYKDLENLYHIADIREIVIGYLRHIYRTYTEGISTITEKQQIIEKKYNLTSTTGNNLNGLRDKIKWTKDKIEEYKRNLHLGSQMLQEQIKLEALLKALEKDTPEYEKLMNSYDAFYNTTWEFLALKDIMTEFHIHQTDMMKPGWEKINEEYYYYDNHGHMVTEWKEIDGKWYYFSPTNNNSNYESTKNLPFAHTFNKGQMMYGWIKTDKNENYEYYMSPFDHNTNNYQPNGRAFGVGEMWRGWLKFTDKDRNGHEVSDWYYFFDTRSAQIYGMPLGHRVEQSDRKGKLHTMYRGCFDLTEQPPGTPVPGRDHSRFDSSGRWLGNGC

SEQ ID NO: 76 - protein, 274 aa, Bacillus sp.
MANFSSLQDATYKYLEDKYIRVPNSEYDSILAVNNQNLGISGPVTLPNLISTADPRTVVQTSTIINSSSADITKQFSFSETVTDTITNSLELGFELGISREVSMGATIELVKLDTKQTISTKFSMKSTQTTTQTKTRTWVDQYTVPVKANTEATVIYTLSIGTFNGFVDVDLKLSGNMLATLFLSLYGEIANIGVGPGVVKGIAIPISDIVNYAQPAGFTVNPDKTVSFKGKLHLQGELGIKSELFVNSKSLTTGATTTTPLSIQTAPKTLLFA

SEQ ID NO: 77 - protein, 375 aa, Bacillus sp.
MKYKDRKDAKRKYKQALLATVATMTLGVSTLGSTSSAFAEEIPVQAKKEGVYYNHTPLMNYENFYKWVLLGDNVLAPGDNTQIKNLISTGKKTQEIVSFPLINDSDSEKNMSIPKRTYKVADSLSSTSGNEFTFGQEISFEASGKAGIPLVTEGSIKTTLKATFGQKITNSKTELHSTEKSFEYGGGSLPVKAGENLKVTFIYSQEGFSGTAVNRRLIQDRDTNGNLFTKRIGAVGINYWDGKNATAFDLYSGGDGVKGSDVLGAPDGPRYSGVEQGKLSTPYDLFSLINKKNTNGLSTANLVITYPFHNDSYLIPTYELRNKLDIDDVNKKVYVREAETQFEGATGGEIIQKIENMKTGDVKYSLVSSVPMISE

SEQ ID NO: 78 - protein, 337 aa, Artificial Sequence
  source: /note="Description of Artificial Sequence: Synthetic polypeptide"
MEEIPVQAKKEGVYYNHTPLMNYENFYKWVLLGDNVLAPGDNTQIKNLISTGKKTQEIVSFPLINDSDSEKNMSIPKRTYKVADSLSSTSGNEFTFGQEISFEASGKAGIPLVTEGSIKTTLKATFGQKITNSKTELHSTEKSFEYGGGSLPVKAGENLKVTFIYSQEGFSGTAVNRRLIQDRDTNGNLFTKRIGAVGINYWDGKNATAFDLYSGGDGVKGSDVLGAPDGPRYSGVEQGKLSTPYDLFSLINKKNTNGLSTANLVITYPFHNDSYLIPTYELRNKLDIDDVNKKVYVREAETQFEGATGGEIIQKIENMKTGDVKYSLVSSVPMISE

SEQ ID NO: 79 - protein, 423 aa, Bacillus sp.
MKPKSEEIQSPSPKWSKSEYNNYRNGYAYDANIGYENKNWMNELRGETKISQLSIPGTHGSIALHGVTGADRWVINQRMSITTQLNSGIRYLDIRARRTGTAFAMHHGAAYQKKMFGDILNEVTAFLRQHPRETVLMRLKEEHTPEDGSRSFEEILKGYWDNPSYKNYFWQPAGSGNGSGVNANPELTDVRGKIVLLQQFAVSKAYGINYSNLEKQDHDNVRFSMDGMYAKWTAVKNHLIKANSDQNKIYLNHLSGNGGPSGGAAPQFVASAYGGDGEPLMGTGSPSQYPDFPTENYRLYYGGMNIMTSQYIPRSGLQYTGIVAADFPGKGLVERIIRLNDKHIADIRHISISVEIPANSAAKLTVYSTTGATIGQQFMANPNSVELNVTFSFHIPDGVKYDKYTLEISPLNTRKRELLAELF

SEQ ID NO: 80 - protein, 272 aa, Unknown
  source: /note="Description of Unknown: Organism from environmental sample"
MTIKEELTQPQSHSLEIEDLSGEAEHGDLRAVLTSNLSGNFDQFPTKSGDFQIDSYLLDYSAPKKCWVNGITVYGDIYIGKQQWGTYTRPVFAYLQYMDTISIPQQVIQTRSYQLTKGHTKSYETSVNAKYTVGAKIGIVNVGSDISVGFSQTESWSTTQTFTNSTQLAGPGTFMVYQIIVVYAHNATSAGRNNSNVFAYNKTNDVGSRVDLYYLSAITLDKKVIVESGQAISPLDWNTVQRNVLMENYNTASNNGHFRFDWSAYDNPHRRY

SEQ ID NO: 81 - protein, 450 aa, Unknown
  source: /note="Description of Unknown: Organism from environmental sample"
LVLSFYIAKVILFRNKSISNVQYNFIFCNLVGILPTKLGGNIMKSISKKVMAGLGVGAMSLSIWAPSSQAAAPENNRYYSIHLKANAKLAWDVYKGWDSDNAGITLYNTSSRGDNEQFVFFPLDGGAYAIVNKNSGKPVGLGNAYISTDGVRDGFSGNNQGLRQTNWTGASNEQWYLRDKGNNNYEIVNQGTGKVASWAWNGISGPHSAEYVDLDESNPSDNNRVFNIAKNGLGGIGVSIPGFDIDYGTFSLPTLPTVGTRPNAPDYNTSGAIDQQLPQTSNSVVVGASLIPSIMVKDNGASDYTKIHNSPYYVLVKEEYWEKVRSEIIPAGATSKYTVKSGVSEIDQKKMSDTLAMSFGSDLGLKFGESSLSIKSSVSRTIQTEVTKTSTNATEETEEKSIPSIPGKNTGFTAYQLVTKYTLKRTDGSVVTDPSIVRDSKQTIARTIAN

SEQ ID NO: 82 - protein, 408 aa, Artificial Sequence
  source: /note="Description of Artificial Sequence: Synthetic polypeptide"
MKSISKKVMAGLGVGAMSLSIWAPSSQAAAPENNRYYSIHLKANAKLAWDVYKGWDSDNAGITLYNTSSRGDNEQFVFFPLDGGAYAIVNKNSGKPVGLGNAYISTDGVRDGFSGNNQGLRQTNWTGASNEQWYLRDKGNNNYEIVNQGTGKVASWAWNGISGPHSAEYVDLDESNPSDNNRVFNIAKNGLGGIGVSIPGFDIDYGTFSLPTLPTVGTRPNAPDYNTSGAIDQQLPQTSNSVVVGASLIPSIMVKDNGASDYTKIHNSPYYVLVKEEYWEKVRSEIIPAGATSKYTVKSGVSEIDQKKMSDTLAMSFGSDLGLKFGESSLSIKSSVSRTIQTEVTKTSTNATEETEEKSIPSIPGKNTGFTAYQLVTKYTLKRTDGSVVTDPSIVRDSKQTIARTIAN

SEQ ID NO: 83 - protein, 379 aa, Artificial Sequence
  source: /note="Description of Artificial Sequence: Synthetic polypeptide"
MPENNRYYSIHLKANAKLAWDVYKGWDSDNAGITLYNTSSRGDNEQFVFFPLDGGAYAIVNKNSGKPVGLGNAYISTDGVRDGFSGNNQGLRQTNWTGASNEQWYLRDKGNNNYEIVNQGTGKVASWAWNGISGPHSAEYVDLDESNPSDNNRVFNIAKNGLGGIGVSIPGFDIDYGTFSLPTLPTVGTRPNAPDYNTSGAIDQQLPQTSNSVVVGASLIPSIMVKDNGASDYTKIHNSPYYVLVKEEYWEKVRSEIIPAGATSKYTVKSGVSEIDQKKMSDTLAMSFGSDLGLKFGESSLSIKSSVSRTIQTEVTKTSTNATEETEEKSIPSIPGKNTGFTAYQLVTKYTLKRTDGSVVTDPSIVRDSKQTIARTIAN

SEQ ID NO: 84 - protein, 805 aa, Bacillus sp.
MSTDQNRNEYEILDFSSYHEYTSNRYPFAKNPNVMENTNYKNINPSFIGSALGSIFNIFQLYASFFQTPSVFNGIELIQGIISKILNFQVINLTINDVQQLIDQTLENHIRNEANQRFNSIQANFNQYLSNKSLYINNPSDSTRRLFVNSLSANERDLRIALDVTFSLANREVLLLPNFTQIAMLHLTILKDAVMFSGPDLIAPTVSEASENSILNRPPSDSYESALLTNISMYTNYCVRHYNEGLNRIRNRGTSGNIWLNFHSFRREMTLTVLDFVALFSFFDTTKYPASRNFTPPVVSQLSRVIYTDPVGAIRTDGRGWFDPPVGTDRIRVNFASIENEIPAPTTSRHLSELTISSGPLGFGINPSRTHSWQGNRNVNISAPTDVSGVISNRTQTIPARNIFRVDSRVYTLDWRLYGVYRAEFFQDASQNSQRRVFAENPPTGAGAQSANNFRFLPGENSDTPTPQDYTHLLSRVVNATVGLTPATGNQRNSVLIFGWTHKSLTSENIYKINEITQVAAVNTRSNSGIQVISGPGFTGGDLVRMNPNGSVSYNFTPANQQAGQSNLAIRLRYASQGTASLRITFGNGSSQVIPLDATTSSIKNLQYEGLRFIDVPNNVSSLPTGTSMTIQNISTNSNVVLDRVELFSDIPIPISEEPIIIPGNYQIVTSLNNSSVVDLHVDTNNVTLWSDNERTSQFWGFTYDQSRNAYVIRSVRNTDLVLAWNVPSIDRNVFATPFVPDRDEYYWMIERFEGGYILKNMGNPNFLLTAYPEGTANGTNITVNQRHNVNNSYKFGQIFFLRRT

SEQ ID NO: 85 - protein, 650 aa, Artificial Sequence
  source: /note="Description of Artificial Sequence: Synthetic polypeptide"
MSTDQNRNEYEILDFSSYHEYTSNRYPFAKNPNVMENTNYKNINPSFIGSALGSIFNIFQLYASFFQTPSVFNGIELIQGIISKILNFQVINLTINDVQQLIDQTLENHIRNEANQRFNSIQANFNQYLSNKSLYINNPSDSTRRLFVNSLSANERDLRIALDVTFSLANREVLLLPNFTQIAMLHLTILKDAVMFSGPDLIAPTVSEASENSILNRPPSDSYESALLTNISMYTNYCVRHYNEGLNRIRNRGTSGNIWLNFHSFRREMTLTVLDFVALFSFFDTTKYPASRNFTPPVVSQLSRVIYTDPVGAIRTDGRGWFDPPVGTDRIRVNFASIENEIPAPTTSRHLSELTISSGPLGFGINPSRTHSWQGNRNVNISAPTDVSGVISNRTQTIPARNIFRVDSRVYTLDWRLYGVYRAEFFQDASQNSQRRVFAENPPTGAGAQSANNFRFLPGENSDTPTPQDYTHLLSRVVNATVGLTPATGNQRNSVLIFGWTHKSLTSENIYKINEITQVAAVNTRSNSGIQVISGPGFTGGDLVRMNPNGSVSYNFTPANQQAGQSNLAIRLRYASQGTASLRITFGNGSSQVIPLDATTSSIKNLQYEGLRFIDVPNNVSSLPTGTSMTIQNISTNSNVVLDRVELFSD

SEQ ID NO: 86 - protein, 330 aa, Lysinibacillus sp.
MKKFKNTVLTMVAVTSIGTTFVLTSPITASAAQNTVENITANERIQTKSELEDAKIPIENLVNHFVKNLNKYYPEKVQGTYREEKDPKIIYNHLTFNQFSVQADGSPVITNSENVYVGRETLTNNTATEQTLTTQSFSKTISHTVTSSTTHGFKFGTKATAKFNIPFVGETGIELSAEYDFSNTDSLENSESYTYIVSPQNIRVPAYSSVEVIVVLNTAKMNGNVKLLANASGTITASPFYTFPQYPNIDFYAYIENMKLNEIAGVVSQEHLKHISVNSDGETINVIGSGQYEAKYGTSSSVTVNPVNVKRNAADEGYTYNIIPTIEREN

SEQ ID NO: 87 - protein, 300 aa, Artificial Sequence
  source: /note="Description of Artificial Sequence: Synthetic polypeptide"
MAQNTVENITANERIQTKSELEDAKIPIENLVNHFVKNLNKYYPEKVQGTYREEKDPKIIYNHLTFNQFSVQADGSPVITNSENVYVGRETLTNNTATEQTLTTQSFSKTISHTVTSSTTHGFKFGTKATAKFNIPFVGETGIELSAEYDFSNTDSLENSESYTYIVSPQNIRVPAYSSVEVIVVLNTAKMNGNVKLLANASGTITASPFYTFPQYPNIDFYAYIENMKLNEIAGVVSQEHLKHISVNSDGETINVIGSGQYEAKYGTSSSVTVNPVNVKRNAADEGYTYNIIPTIEREN

SEQ ID NO: 88 - protein, 333 aa, Bacillus sp.
MVLKMKKYKKLAMILPLTGMLCAGGLLTDTNKSFASSLGQQNYKGYDNFDDPYRADLRGRVLVALSARDHEEYGIDEADMLNAKWDWQFQYVDGQINTDATVDSYTDSGEVELLNYRNDTNINQNHQTVEKTVKTTENFTYSNAGGAKLGLDVEAKLGVTVPFVADGGLTVTAKTEFSYNHTSSNAVTKETMYRFPSQTIVCQAGYITRYVGKVQSANFSGTFSGKVAATGNLEIYVINSKGERVLKTISIYDIYKYTKNDMPLQSGVELDEQKKRVIIPWNVESRYTGQGGHNAIVNVTVTPINNQGAARTMPLRNYLDKVNNGTLDEFMSK

SEQ ID NO: 89 - protein, 329 aa, Artificial Sequence
  source: /note="Description of Artificial Sequence: Synthetic polypeptide"
MKKYKKLAMILPLTGMLCAGGLLTDTNKSFASSLGQQNYKGYDNFDDPYRADLRGRVLVALSARDHEEYGIDEADMLNAKWDWQFQYVDGQINTDATVDSYTDSGEVELLNYRNDTNINQNHQTVEKTVKTTENFTYSNAGGAKLGLDVEAKLGVTVPFVADGGLTVTAKTEFSYNHTSSNAVTKETMYRFPSQTIVCQAGYITRYVGKVQSANFSGTFSGKVAATGNLEIYVINSKGERVLKTISIYDIYKYTKNDMPLQSGVELDEQKKRVIIPWNVESRYTGQGGHNAIVNVTVTPINNQGAARTMPLRNYLDKVNNGTLDEFMSK

SEQ ID NO: 90 - protein, 299 aa, Artificial Sequence
  source: /note="Description of Artificial Sequence: Synthetic polypeptide"
MSSLGQQNYKGYDNFDDPYRADLRGRVLVALSARDHEEYGIDEADMLNAKWDWQFQYVDGQINTDATVDSYTDSGEVELLNYRNDTNINQNHQTVEKTVKTTENFTYSNAGGAKLGLDVEAKLGVTVPFVADGGLTVTAKTEFSYNHTSSNAVTKETMYRFPSQTIVCQAGYITRYVGKVQSANFSGTFSGKVAATGNLEIYVINSKGERVLKTISIYDIYKYTKNDMPLQSGVELDEQKKRVIIPWNVESRYTGQGGHNAIVNVTVTPINNQGAARTMPLRNYLDKVNNGTLDEFMSK

SEQ ID NO: 91 - protein, 396 aa, Bacillus sp.
MKSISKKVMAGLLVGATGLSIWAPASEAAELEKNRYYAITLKANSNIGWDVYEQATYDDAGIRLFGNGIKDNERFLFFPLDGGSYAIVNKNSGKAVTTGSGWIAPNTMSHDPEALKQAKWTGAATDKWNLRDAGNGYHEIVNQGYGKVASYAKAGIGPLAVDFVDLDNSNPSDPDRVFKIFGGTLEFFGQQMKFFDDTFSLPNLPATGTRPDAPNYTGGIDQQLPQTSNSVVVGASLLPCIMVNDSQASDYTKIHNSPYYTLVKEEYWDKTFSKVIQPGLSESYSYKTGVSSVDQQKMTDTLSMKFGADLGIKFGDVSSSLKSEISRTIQTEISTTNSEATEETRSYTATGEAGKATGYTQYQLATKYTLKRADGSIVSDPWVVKNDKITVTRKTS

SEQ ID NO: 92 - protein, 369 aa, Artificial Sequence
  source: /note="Description of Artificial Sequence: Synthetic polypeptide"
MAELEKNRYYAITLKANSNIGWDVYEQATYDDAGIRLFGNGIKDNERFLFFPLDGGSYAIVNKNSGKAVTTGSGWIAPNTMSHDPEALKQAKWTGAATDKWNLRDAGNGYHEIVNQGYGKVASYAKAGIGPLAVDFVDLDNSNPSDPDRVFKIFGGTLEFFGQQMKFFDDTFSLPNLPATGTRPDAPNYTGGIDQQLPQTSNSVVVGASLLPCIMVNDSQASDYTKIHNSPYYTLVKEEYWDKTFSKVIQPGLSESYSYKTGVSSVDQQKMTDTLSMKFGADLGIKFGDVSSSLKSEISRTIQTEISTTNSEATEETRSYTATGEAGKATGYTQYQLATKYTLKRADGSIVSDPWVVKNDKITVTRKTS

SEQ ID NO: 93 - protein, 305 aa, Bacillus sp.
MKKVFLFSTIIFSFILSSFPLVTKAQDIQIHNLQSDLDQIGISYYHERLAGTTMTGLYKYSSEPKSVDTSYYNFDIDRSSVKTTSNRTSISPVFIGQSEFANGTDKSQRFTTQTYSEEISQTFDTSNVSGFNLGGNRFISILLQMIDGKKFDIIQNTASKTVSSETKNQRLTASPQTIKVPAHKTYVVETYLTRDQYDFTTTYTAKGNLGRTNIKTTAMWIAYDGTPHLKKGSISDDTINYWNALSNNGKSGIKNLKINNVNNSFSFDGKVYTKAVYGSTYTIKTYEKNEKNQRILVDKFTLPIE

SEQ ID NO: 94 - protein, 281 aa, Artificial Sequence
  source: /note="Description of Artificial Sequence: Synthetic polypeptide"
MQDIQIHNLQSDLDQIGISYYHERLAGTTMTGLYKYSSEPKSVDTSYYNFDIDRSSVKTTSNRTSISPVFIGQSEFANGTDKSQRFTTQTYSEEISQTFDTSNVSGFNLGGNRFISILLQMIDGKKFDIIQNTASKTVSSETKNQRLTASPQTIKVPAHKTYVVETYLTRDQYDFTTTYTAKGNLGRTNIKTTAMWIAYDGTPHLKKGSISDDTINYWNALSNNGKSGIKNLKINNVNNSFSFDGKVYTKAVYGSTYTIKTYEKNEKNQRILVDKFTLPIE

SEQ ID NO: 95 - protein, 329 aa, Bacillus sp.
MKKYKKLAMILPLTGMLCAGGLLTDTNKSFASSLGQQNYKGYDNFDDPYRVDLRGRVLVALSARDHEEYGIDEVDMLNAKWDWQFQYVDGQINTDATVDSYTDSGEVELLNYRNATNVNQNHQTVEKTVKTTENFTYSNAGGAKLGLDVEAKLGVNVPFVANGGLKVTAKTEFSYNHTSSNAVTKETMYRFPSQTIVCQAGYTTRYVGKVQSANFSGTFSGKAAATGNLEIYVINSKGERVLKTISIYDIYKYTKNDMPLQSGVELDEQKKRVIIPWNVESTYTGQGGHNAIVNVTVTPINNQGAARTMPLRNYLDKVNNGTLDEFMSK

SEQ ID NO: 96 - protein, 299 aa, Artificial Sequence
  source: /note="Description of Artificial Sequence: Synthetic polypeptide"
MSSLGQQNYKGYDNFDDPYRVDLRGRVLVALSARDHEEYGIDEVDMLNAKWDWQFQYVDGQINTDATVDSYTDSGEVELLNYRNATNVNQNHQTVEKTVKTTENFTYSNAGGAKLGLDVEAKLGVNVPFVANGGLKVTAKTEFSYNHTSSNAVTKETMYRFPSQTIVCQAGYTTRYVGKVQSANFSGTFSGKAAATGNLEIYVINSKGERVLKTISIYDIYKYTKNDMPLQSGVELDEQKKRVIIPWNVESTYTGQGGHNAIVNVTVTPINNQGAARTMPLRNYLDKVNNGTLDEFMSK

SEQ ID NO: 97 - protein, 331 aa, Bacillus sp.
MKIYMEIYQDFMFSITFIIEGMTMLMSSNIFDLDQYLYMGVSLHEMYRIIDSFGFPIPCSVATEYYNKVLYKEVEIPPNYSNSRVQISNQKLDYKLPPLSSNNVEPLVIVGGVFENNTSTPMTFQSLEIKRTTGTTISSSTTYGFKAGTKIGSSTTVKAEVPFVGGAETTLSIEFSFETDFSKTEGIVEMDETSITIPPQTILVEPGQKKRLEVELYKVKIPEATFTIDGDVSGEASIESNKLNIYSGLYFINRLCPNTYVNVNNNLRLDSNRQTLHFKGEGKAAFEILAVEYVMRIITLDTKTGAKIHEETAVRQLPSTKEAQLNENSII

SEQ ID NO: 98 - protein, 305 aa, Artificial Sequence
  source: /note="Description of Artificial Sequence: Synthetic polypeptide"
MSNIFDLDQYLYMGVSLHEMYRIIDSFGFPIPCSVATEYYNKVLYKEVEIPPNYSNSRVQISNQKLDYKLPPLSSNNVEPLVIVGGVFENNTSTPMTFQSLEIKRTTGTTISSSTTYGFKAGTKIGSSTTVKAEVPFVGGAETTLSIEFSFETDFSKTEGIVEMDETSITIPPQTILVEPGQKKRLEVELYKVKIPEATFTIDGDVSGEASIESNKLNIYSGLYFINRLCPNTYVNVNNNLRLDSNRQTLHFKGEGKAAFEILAVEYVMRIITLDTKTGAKIHEETAVRQLPSTKEAQLNENSII

SEQ ID NO: 99 - protein, 672 aa, Bacillus sp.
MNHYNNEDYEIIDSNYSSHQPNNNYSRYPYTNNPNQSIQNKNYKDWLTISHQNKKYNKSIENFVETGIAVSAGMIVVGTILSLFTFGIIPGTILISMGTITSTLYPENRDTVWRSFMLHGGSFFNQQFEESRALQTLNGFKNVIDSYEDALKSWNDLKEKQIPGSPPSSELKQAASLVKTRLEIVHNDFVRDMSEFQIEPYKQLLLSSYAQAAVLHLNLLQQGAQLADRWNQDIFGNSQIIFETNAGTSEGYAQLAKKYIAEYSDYCIKTYNDGEKILKASSNMTWNTYNRYRREMTLIVLDLIATFSKFDIKYYSIPTKNELTREIYTDALGGTDRTDSLFEYETRLIRPPHLFTWLKAITHHSDSTLPFKYLSGITNHYLITNDSYYKTYDYGDTTDQKIISSFNYDIYKISIARNIQRFASNFPPPYNYTIPDQIYRINYYLSNANTINYNPSNTPPLSTIQTEIKLPRDKNCNSISNPECSPDYNNYSHILSWFSMHIKLNPNITPGISHIYLFTWTHKSVDPDNRVFDYMISQIPAVKATNIGSSVVIKGPGHTGGNLVYLANNSDLEISYAYQGTAIQKFHIRIRYAASADTQMIIYGNNILFTQFTLKKSFTDSNDAELKYDNFKYITIETNMNISQTINNQLKLRQYDSSNKIVFIDKIEFIPI

SEQ ID NO: 100 - protein, 191 aa, Bacillus sp.
MEHKHTNPQSDYSHHNEYKPESQSSLSYSQLPQHSLHPTDKNHILPFSTILDLPKGFHIQKQIHPKLVYDLSYLSMAKEICKKSIEVDNCGYVDVDLHVLKIKGCLSFLLNVCIEPISKQTMCSTDHKDNSIFLCAKDTLYVDHILKYSIDTLPYYVIDEHHIHVRKLEIEMLEASHGIAKISGEFYFEYE

SEQ ID NO: 101 - protein, 396 aa, Bacillus sp.
MRKYKKLAVVVPLAGMLMSGAGVLGGATSAHADGIKIDGVRTGGQISGGQTLSDKEVFDIYVNHWKEGKYGNWRDGAYVGPLDMSDSAPDVKAGIMSSGYLIHQDQLPAVIEKIKNTEQLELMDLLQILTPETTVDKDIQKHQYLTVNTDKKTHINIDKTEIIGKPIAAPQTVTNDTDQEGTATAPSISKKFTSTISRTDTHSTTLGMKQTIKGGIDFLGIAEGDFSQEFSESYTYSNASQKLTSEETTITSGPVTIKTQPHSAYEFDIIFQQAKNSGTVTGTSHLGGGYGSKGPDNYYYDLSIYKKMKVIQDLYPQLWAVLQAKGIDVNDTTQEVNYTGAISFEGITGAKINVTAKNLATGEVINRLITPTPVKPGTNMNITEQLQGTIQSIVSQ

SEQ ID NO: 102 - protein, 365 aa, Artificial Sequence
  source: /note="Description of Artificial Sequence: Synthetic polypeptide"
MDGIKIDGVRTGGQISGGQTLSDKEVFDIYVNHWKEGKYGNWRDGAYVGPLDMSDSAPDVKAGIMSSGYLIHQDQLPAVIEKIKNTEQLELMDLLQILTPETTVDKDIQKHQYLTVNTDKKTHINIDKTEIIGKPIAAPQTVTNDTDQEGTATAPSISKKFTSTISRTDTHSTTLGMKQTIKGGIDFLGIAEGDFSQEFSESYTYSNASQKLTSEETTITSGPVTIKTQPHSAYEFDIIFQQAKNSGTVTGTSHLGGGYGSKGPDNYYYDLSIYKKMKVIQDLYPQLWAVLQAKGIDVNDTTQEVNYTGAISFEGITGAKINVTAKNLATGEVINRLITPTPVKPGTNMNITEQLQGTIQSIVSQ

SEQ ID NO: 103 - protein, 402 aa, Bacillus sp.
MKSISKKVMAGLAVGAMSLSIWAPVSEAAPDNNRYYSIHLKADPRLAWDVAGNSGDNNRAILLWNGNRGDNEQFVFFKLDGQNYAIVNKNSGKPVTFGGASATYGNRKALLWDGPLLQRSWTGSPTEQWYLRDKGYNNYEIVNQGNQKVASYAYTWASEHVEFVDLDEANPSDSNKVFNIAKNPLEASGLPSPFPGFDYDTFSLPTLPAIGSRPKVPEYNNSGPIDQELPEKTESAVVGASLIPCIMVNDNQASDYTKIHNSPYYTLVKEEYWERIYSKVVPDGAPDKTTNKVGVTSTDQQKMTDTLSMKIGVDLGLKFGQQSASLKSEISRTLQTEISTSNTESKETTTDHVFISAPGKTTGFSKYQQVIKYTLKRADGSLVSDPWLVKNPDQTVTRKIEK

SEQ ID NO: 104 - protein, 375 aa, Artificial Sequence
  source: /note="Description of Artificial Sequence: Synthetic polypeptide"
MAPDNNRYYSIHLKADPRLAWDVAGNSGDNNRAILLWNGNRGDNEQFVFFKLDGQNYAIVNKNSGKPVTFGGASATYGNRKALLWDGPLLQRSWTGSPTEQWYLRDKGYNNYEIVNQGNQKVASYAYTWASEHVEFVDLDEANPSDSNKVFNIAKNPLEASGLPSPFPGFDYDTFSLPTLPAIGSRPKVPEYNNSGPIDQELPEKTESAVVGASLIPCIMVNDNQASDYTKIHNSPYYTLVKEEYWERIYSKVVPDGAPDKTTNKVGVTSTDQQKMTDTLSMKIGVDLGLKFGQQSASLKSEISRTLQTEISTSNTESKETTTDHVFISAPGKTTGFSKYQQVIKYTLKRADGSLVSDPWLVKNPDQTVTRKIEK

SEQ ID NO: 105 - protein, 339 aa, Unknown
  source: /note="Description of Unknown: Organism from environmental sample"
MNNKKNMKRKIAATSSIITLATSFAFTSPELTKADSKNSVSKNQQYMDAGERPTVPVDMDEDYGIRSLVKDNTDTFYDVVRGIVQWHGIDTLNANFLHYAKPTHSINLVAEPKDEPSSPVLIGKTNLNNKSQSTQKLQSASMSRAVTSTVTSTVTHGIKAGAKAGAKLKVPLVSEASVELNAEYNFTHAGSNTSTETVTYTLPSQTIELKPGQTATVNANLRMMKTSGEVQLRTKYEGYVHLMGMLIGTTNNINQNVKLGEFVDRFIKVDPNLKEYWHVNSPDDSIAYQVGKGNFTAEYGTVADVTVDIFDQDRTDGTDTTQPIKSYTYTVIPEVSKNI

SEQ ID NO: 106 - protein, 306 aa, Artificial Sequence
  source: /note="Description of Artificial Sequence: Synthetic polypeptide"
MDSKNSVSKNQQYMDAGERPTVPVDMDEDYGIRSLVKDNTDTFYDVVRGIVQWHGIDTLNANFLHYAKPTHSINLVAEPKDEPSSPVLIGKTNLNNKSQSTQKLQSASMSRAVTSTVTSTVTHGIKAGAKAGAKLKVPLVSEASVELNAEYNFTHAGSNTSTETVTYTLPSQTIELKPGQTATVNANLRMMKTSGEVQLRTKYEGYVHLMGMLIGTTNNINQNVKLGEFVDRFIKVDPNLKEYWHVNSPDDSIAYQVGKGNFTAEYGTVADVTVDIFDQDRTDGTDTTQPIKSYTYTVIPEVSKNI

SEQ ID NO: 107 - protein, 347 aa, Bacillus sp.
MLNVSKNEFYKLWNVRYNKPLSTGAAGGNTDVFLYNDNTGLDQRWLIIPLDDGTFMVANKADGNVLATTTGEGGAFVYRPLDTTDQHWINVDVGNGNFQVRNHKFGKNLATNGGNVFLYDPLDATVTDQQWRVAPIESFSLPSLPNVSPEDPVPSFISDGNIASSTPERTIGAMHMPYVMVNDGWSTKEQINSTPYYVAEHRTHWIRVAIHVLPAYTKYSTSTTTGISKTSQIDIENTLSIKISPSAEFSIFGIGFSLKEEIQEQLKVHYTSSTTEMTTTTTSVEFNNTSGHDVDMAAFIRVHRIITKRADGSSVLDISYQDPNSLSIVSHVRSDQKSNPIPFPGDC

SEQ ID NO: 108 - protein, 336 aa, Unknown
  source: /note="Description of Unknown: Organism from environmental sample"
VYKMNKWIKPIVCVGILTTSVTTFNNSKTAYAQSSSQFIYDLQDNATDCLNSIGRNQNNDVNFQENKSAETYNFKSVSFSSPFDIKFEKYYAEKIGPENQIDEKTVFSFTDELINHSSTSQKLSTGTRSEAVSITTTATITKGFKIGGKTSTKISIPFIGETGIEVSPEYNQSDVTSDVKTTMKTLTATPQSIDVPAGKKALVAVEFTQRTIEGKVKLNAIASGHAKGTFDYIGMPFITSGADKWVKREFDMNLNQIYKRSAELSNEVNHSSIITINPDNETITLHGEAKYTSEHNDSSCRVHVDIVDIDTDTSNKNRMKKEDIINSYSYTVNLEN

SEQ ID NO: 109 - protein, 305 aa, Artificial Sequence
  source: /note="Description of Artificial Sequence: Synthetic polypeptide"
MQSSSQFIYDLQDNATDCLNSIGRNQNNDVNFQENKSAETYNFKSVSFSSPFDIKFEKYYAEKIGPENQIDEKTVFSFTDELINHSSTSQKLSTGTRSEAVSITTTATITKGFKIGGKTSTKISIPFIGETGIEVSPEYNQSDVTSDVKTTMKTLTATPQSIDVPAGKKALVAVEFTQRTIEGKVKLNAIASGHAKGTFDYIGMPFITSGADKWVKREFDMNLNQIYKRSAELSNEVNHSSIITINPDNETITLHGEAKYTSEHNDSSCRVHVDIVDIDTDTSNKNRMKKEDIINSYSYTVNLEN

SEQ ID NO: 110 - protein, 328 aa, Bacillus sp.
MRKYKKLAVVMPLAGMIMSGVGVLGGPASSFADTMPQAKVAPHVTNFAAADHYQQFMDFMSSKGMERFANNFEIVAMPDSGPKNIRITEAKPINAPENTTQVMSYHNVTGVQQSLKTPSKKITHKNTLAIKNGGSIKTTIESKTTFGVQVPFFAKGEQELKVGLEVTYNRESTDTAENTQEFTVPEQTLLAQPGGTTRLVYTVKSTAFSGTYSQKAIFKQKQDGISKLFENGKEVEGKELESWNEKQGYRFIKQVLASQPQLADIFEMDDANEKAYLKEAVFTFEGQAGHQSTAEAVFIPDDNKKPEVKMPIAEYNKRVARGISLYAK

SEQ ID NO: 111 - protein, 297 aa, Artificial Sequence
  source: /note="Description of Artificial Sequence: Synthetic polypeptide"
MDTMPQAKVAPHVTNFAAADHYQQFMDFMSSKGMERFANNFEIVAMPDSGPKNIRITEAKPINAPENTTQVMSYHNVTGVQQSLKTPSKKITHKNTLAIKNGGSIKTTIESKTTFGVQVPFFAKGEQELKVGLEVTYNRESTDTAENTQEFTVPEQTLLAQPGGTTRLVYTVKSTAFSGTYSQKAIFKQKQDGISKLFENGKEVEGKELESWNEKQGYRFIKQVLASQPQLADIFEMDDANEKAYLKEAVFTFEGQAGHQSTAEAVFIPDDNKKPEVKMPIAEYNKRVARGISLYAK

SEQ ID NO: 112 - protein, 314 aa, Bacillus sp.
MKKWIVLTSLVTLLGVSAPTNYHVFADGNSAHSINKVTTGEKNLGPVFLQKAFTKGKTTTILKGTESKTYEHPEFVTVAGLDNTIGTIEQEVQTPSRSKKTATSFTTTNSIEFNVENTLKVEGSVPGLGKVANDLKVGMKQTTGNTYVSSNEITLTIPSQKIRVPAGKHYQATAVYKEERITGTVTNDIELTGNLEWLSFFGDNKEEFNLISELPTKEHTNITPYQFVKLIQAEKKNGHKWIHLLTKAKPGMPNTWTLNIDDFLRNLDIDDTDQKIVLKGVETNFTATSGISFHMKINDLTSQNTVFQSSIKYF

SEQ ID NO: 113 - protein, 289 aa, Artificial Sequence
  source: /note="Description of Artificial Sequence: Synthetic polypeptide"
MDGNSAHSINKVTTGEKNLGPVFLQKAFTKGKTTTILKGTESKTYEHPEFVTVAGLDNTIGTIEQEVQTPSRSKKTATSFTTTNSIEFNVENTLKVEGSVPGLGKVANDLKVGMKQTTGNTYVSSNEITLTIPSQKIRVPAGKHYQATAVYKEERITGTVTNDIELTGNLEWLSFFGDNKEEFNLISELPTKEHTNITPYQFVKLIQAEKKNGHKWIHLLTKAKPGMPNTWTLNIDDFLRNLDIDDTDQKIVLKGVETNFTATSGISFHMKINDLTSQNTVFQSSIKYF

SEQ ID NO: 114 - protein, 323 aa, Paenibacillus sp.
MSNVVEYNTIVSKARTHDNKLLVITASEKEDKLYVSPQQYGNDHQLWEKRQVRSGDTNAYALVNKATGTCIGRKDATNGSKLYLESVSEADVNGLMVWRDDHVTGTHNAINSYVDWEQKVNIPGNGPYADGNVLVTWEWSKGQPNELWVFVPDKKTISVKRMDFQMDKAIILNSVPIVSSKQIVSNHTDTEQTQKVTLSFSKGYTYSFTRERGIKISETVKFKGGLPLVGESEVEIVVEGSRTYSETNTQEDTQKITTEVPVVLPPRKSIEVSAILLQGIIDVPYTVTFDIEYPGKKVEETVSGKYTGVNTFTMKTDFKLLGD

SEQ ID NO: 115 - protein, 347 aa, Bacillus sp.
MKKKYYKVLAIFPLACMLSTPMLAAPVSTFAAETQNEQGTKAIDRATFEQDLKYAMTSIPAIIQPNGTGKIYNPFHTTNPAIINMVFSLENFKDVTATETKDITTADDMQEATYENVTDLNQTHITPSKTITNTDSFTYSNSEGAKLGVELDHTFNANVSIPGVGGAGGSTTEKVSTEFSYNHTSSNTTSHTEQITIPSQTIVAAPHGTTHYIGKVQRVEFSGTTENTGYITGTIEAETNFRKATEYGPGTGPYDYTQNGKEKVDIYDVFKQALTNPAYRGLPNYIELDNVNKRVILKQPITSTFTGKLGFKSDAKIEFIPSDPNKPKVQMSLTDYQNPEKRAQLLK

SEQ ID NO: 116 - protein, 317 aa, Artificial Sequence
  source: /note="Description of Artificial Sequence: Synthetic polypeptide"
MAETQNEQGTKAIDRATFEQDLKYAMTSIPAIIQPNGTGKIYNPFHTTNPAIINMVFSLENFKDVTATETKDITTADDMQEATYENVTDLNQTHITPSKTITNTDSFTYSNSEGAKLGVELDHTFNANVSIPGVGGAGGSTTEKVSTEFSYNHTSSNTTSHTEQITIPSQTIVAAPHGTTHYIGKVQRVEFSGTTENTGYITGTIEAETNFRKATEYGPGTGPYDYTQNGKEKVDIYDVFKQALTNPAYRGLPNYIELDNVNKRVILKQPITSTFTGKLGFKSDAKIEFIPSDPNKPKVQMSLTDYQNPEKRAQLLK

SEQ ID NO: 117 - protein, 315 aa, Bacillus sp.
MQKNKKLMTKIVPILAISSMSASFAISNPALASASEVDMPHNKIIDETRTNTPGIREWSEPLEKSVSIIAPPNTTWSKFTPLNSETHQFSVVSDGSPTVSDSGSLFVGKNTLTNTSNQEQTLSTSTFSHSITNTVASATTHGFKLGYKASAKFKVPFVGETGMELNAEYNFSSTNTETNSTNYTYTAPAQNIKVPAHSSVEVVVKLDKAKQKGNVQLLTKMSGTGYYRHSSMDTPGGGAGTLDSFYNIVSRASKIEKQEDVSANPDGKTINIIGFGNYEAEYGTEFSVTVTPVDKKGNYTGNQQTYHVKPEIKRN

SEQ ID NO: 118 - protein, 907 aa, Bacillus sp.
VKSMKLKSIFKCLTITAILSQIAVSPVTSFAENSNGKKADNKTNVEEKSNIQGLLGYYFKDAQFQDLTSIKVGEQSDKLIDKARVIKSNQTIHSVRWMGRVNPSQTGEYTFSTSSDQHIILQINGENIIDQSEMKKTIKLEKDKVYELKIEYRNTKNTLPDLQLFWSIDGKAKEPIPPKNILLPNFSEKENLPNNKKDMLLLPNFNLFDNKSYSSKLIDTDTDKDGISDEWEEQGYTFKDQQIVKWEDSYLAQGYKKYVSNPYKARTVADPYTDFEKVSGHMPEATKDEAKDPLVAAYPAIGVGMENLLFSKNENVTEGASGTKSKSVTDTNTNTNSVEVGGEVGGALNPFAFASFKVSTKYSHSWTNSTAIQNSESGSWSRQIGINTAESAFLNANVRYYNAGTAPIYELRPTSNFVFQNSGTSIATITAGSNQIGNSLGPSDTYPKREQAPISLDKANEAGTVKIVINGEQLNAIQSHSEKLNLETTQNKGQYGILDDTGKLITDASKQWDPIRTNIDAVSGSLILDTGTSKENLERRVAAKNENDPEDKTPEITIGEAIKKAFNAKEKDGRLYYTDRTEKNMYIDESSVNLIGDEKTQKEIEKQLEQMQDKKVYKTKWKRGMNITLRLPVAYYDFEANGNTNWYYTNQENGGYTGKKHGMIGQNGNGYAQKNLELQPYTSYTARAYVKTASPTGKNNVVFYADSTINGDGNGARQNVTIEGDKWQVIEFSFNTGGHPEYFQKLGLKNTGNTNLQFDDVSVTEWRRALGENLIQNGNFDKGKEYWESLMGLPSFEVKDGYLIGNSTNIVMNKSLGVKPNTKYKIEYDLRINPGSISKPKILILGYASGSLNEMIEDEVNVSNDWQTYILDFTTASDTQNIIFGIYDAQSGGYYNLDNVKCREVLL

SEQ ID NO: 119 - protein, 904 aa, Artificial Sequence
  source: /note="Description of Artificial Sequence: Synthetic polypeptide"
MKLKSIFKCLTITAILSQIAVSPVTSFAENSNGKKADNKTNVEEKSNIQGLLGYYFKDAQFQDLTSIKVGEQSDKLIDKARVIKSNQTIHSVRWMGRVNPSQTGEYTFSTSSDQHIILQINGENIIDQSEMKKTIKLEKDKVYELKIEYRNTKNTLPDLQLFWSIDGKAKEPIPPKNILLPNFSEKENLPNNKKDMLLLPNFNLFDNKSYSSKLIDTDTDKDGISDEWEEQGYTFKDQQIVKWEDSYLAQGYKKYVSNPYKARTVADPYTDFEKVSGHMPEATKDEAKDPLVAAYPAIGVGMENLLFSKNENVTEGASGTKSKSVTDTNTNTNSVEVGGEVGGALNPFAFASFKVSTKYSHSWTNSTAIQNSESGSWSRQIGINTAESAFLNANVRYYNAGTAPIYELRPTSNFVFQNSGTSIATITAGSNQIGNSLGPSDTYPKREQAPISLDKANEAGTVKIVINGEQLNAIQSHSEKLNLETTQNKGQYGILDDTGKLITDASKQWDPIRTNIDAVSGSLILDTGTSKENLERRVAAKNENDPEDKTPEITIGEAIKKAFNAKEKDGRLYYTDRTEKNMYIDESSVNLIGDEKTQKEIEKQLEQMQDKKVYKTKWKRGMNITLRLPVAYYDFEANGNTNWYYTNQENGGYTGKKHGMIGQNGNGYAQKNLELQPYTSYTARAYVKTASPTGKNNVVFYADSTINGDGNGARQNVTIEGDKWQVIEFSFNTGGHPEYFQKLGLKNTGNTNLQFDDVSVTEWRRALGENLIQNGNFDKGKEYWESLMGLPSFEVKDGYLIGNSTNIVMNKSLGVKPNTKYKIEYDLRINPGSISKPKILILGYASGSLNEMIEDEVNVSNDWQTYILDFTTASDTQNIIFGIYDAQSGGYYNLDNVKCREVLL

SEQ ID NO: 120 - protein, 877 aa, Artificial Sequence
  source: /note="Description of Artificial Sequence: Synthetic polypeptide"
MENSNGKKADNKTNVEEKSNIQGLLGYYFKDAQFQDLTSIKVGEQSDKLIDKARVIKSNQTIHSVRWMGRVNPSQTGEYTFSTSSDQHIILQINGENIIDQSEMKKTIKLEKDKVYELKIEYRNTKNTLPDLQLFWSIDGKAKEPIPPKNILLPNFSEKENLPNNKKDMLLLPNFNLFDNKSYSSKLIDTDTDKDGISDEWEEQGYTFKDQQIVKWEDSYLAQGYKKYVSNPYKARTVADPYTDFEKVSGHMPEATKDEAKDPLVAAYPAIGVGMENLLFSKNENVTEGASGTKSKSVTDTNTNTNSVEVGGEVGGALNPFAFASFKVSTKYSHSWTNSTAIQNSESGSWSRQIGINTAESAFLNANVRYYNAGTAPIYELRPTSNFVFQNSGTSIATITAGSNQIGNSLGPSDTYPKREQAPISLDKANEAGTVKIVINGEQLNAIQSHSEKLNLETTQNKGQYGILDDTGKLITDASKQWDPIRTNIDAVSGSLILDTGTSKENLERRVAAKNENDPEDKTPEITIGEAIKKAFNAKEKDGRLYYTDRTEKNMYIDESSVNLIGDEKTQKEIEKQLEQMQDKKVYKTKWKRGMNITLRLPVAYYDFEANGNTNWYYTNQENGGYTGKKHGMIGQNGNGYAQKNLELQPYTSYTARAYVKTASPTGKNNVVFYADSTINGDGNGARQNVTIEGDKWQVIEFSFNTGGHPEYFQKLGLKNTGNTNLQFDDVSVTEWRRALGENLIQNGNFDKGKEYWESLMGLPSFEVKDGYLIGNSTNIVMNKSLGVKPNTKYKIEYDLRINPGSISKPKILILGYASGSLNEMIEDEVNVSNDWQTYILDFTTASDTQNIIFGIYDAQSGGYYNLDNVKCREVLL

SEQ ID NO: 121 - protein, 510 aa, Unknown
  source: /note="Description of Unknown: Organism from environmental sample"
MNEKKEKQFMKIVTALDNESVVGKSEKFVKLTKNKETADQGWEFVYDVKKDAYQIKSASDKELVLTWTDEDFIRVNPNESKDEQYWVLEDDNDGCVFIHNKKNYNLVLDVDEANTNEGTRIKVTEKHKDPSLPIKAQKFKLQTSNWSTERSFQAINFFKAWLTDVEKRAFMGFQHYPDEQNQVWNDLYWKENGTNNEGQDKFIFLMYKLDDDRVVIVNRQTGEVLEHVYWDEKETSVVLRPYNGKENQVFRKLNIPEWNTFKLLVDNDKRIVGVQDDKVFSRTKITSLDTEKHKDNDYTRLFLNDNGIKDKKISLPSLFPPGELGPIPELTGFNDLLPENEDAKRVVIGSELIPGILVNDSLTLADRIKKNPYYLLEYRQYWHLLWSDLFTAGSNKIKTEVTGISNDAQEKMKLAVGMSMGTDLGLNFTEKSEPFMKQIISGLNSKQSHTTDLGETTTITDVENPEDFTVRFARYARAHEFVLKDSDGKVVEGPWVVVDGNEMFLQRYKK

SEQ ID NO: 122 - protein, 352 aa, Bacillus sp.
MLKFQQNAIYRIKNRSNNKVATISSKLNNMFVDLELDNILSQQWIFFPIDGEKVIITNRATGKVAAINICSKHLSNIKLSPFIPGSSSQQWSIETLCENYYQIRNSSNGKVAAISTSAKSPNNLFVCNSLSTTLNQQWTLLVAKSFKLPTAPKIEKLDPIPQYTSATDILPEATTQRLVAWTLIPCIMVNDNNWSVETKLTTSTYYIFEKKQCWRRIENLSLAPNEKAHSSYTYGTTTKVQTSLQNTLGFTIGRDAGIRFKEGKIGITQDLKMKFHQELKIGISTSTEDMTSTTQTHNQENPFLTTLAYTKYILATQFVLKRISNNSNDRNVIVNSWEYTDGNNIYTTSYLK

SEQ ID NO: 123 - protein, 421 aa, Bacillus sp.
MKPKSEETQSPSPKWSKSEYLSYRNGYAYDANIGYENKNWMNALRGETKISQLSIPGTHGSTALHGITGADRWIINQRMSITTQLNSGIRYLDIRARRTGTSFAMHHGAAYQKKMFGDILNEVTAFLRQHPGETVLMRLKEEHAPEDGSRSFEEILKGYWDNPSYKNYFWQPAGSGNGSGVNANPELKDVRGKIVLLQNFAVSKAYGINYGNLEKQDHDNVRFSMDGMYTKWTEVKNHLNKANSDQNKIHLNHLSGNGGTSGAAPQFVANGYGTDEPLMGTGSPSQYPDFPTENYRLYYGGMNIMTPQYLSRSGLQHTGIVAADFPGKGLVERIIRLNDKHIADIRHISISVEIPANSAAKLTVYSTTGATIGQQFMGNPNPVEINVAFSFNIPDGVRYDKYTLEISPLNTRKRELLAELF

SEQ ID NO: 124 - protein, 735 aa, Unknown
  source: /note="Description of Unknown: Organism from environmental sample"
MNPNNNKYEIIDSNTSPYPSNRSINHFRYPYTNNPNQPLQNTNYKDWLDLCQQNQQYSGNLETFASADTIAAVSAGTIVSGTLLAGVGGLTAISGPIGLIGAIIISFGTLLPIFWPQGEQDKTVWTQFIRMGEILVDTTLSETVKELKLGTLEGIRQILKSYEDGLNDWIRLKKQQAPGLPPSSQLQQAASTVKQRFENVHNDFIREIPGFQLETYKTLLLPIYTQVANMHLNLLQQGVEFADQWNADIHPSQIEPNAGTSNDYYKLLKENIPKYSNYCANTYRTGLNNLRNEPDIRWSIFNDYRRYMTITVLDTISIFSLYDIKKYRDTIGGIQGINYELTREIYTTEINFDRITSPKVQPDLYTMEYNLTRSRLRLFSFLDELIFYTANETYGNRLVGIANHNRYTYATTGTEIIYGKRTGPPTTKILRPFESYKVSIVTDRQVQPTAPFNNIYFIINQIELYLNNSPSNKLTYSAGGNLSNDKKTTDFQFPVKKDCKQITDPNCLPSYNSYSHILSQFSLYTYSYLTGLAVTTLYTGALGWTHSSVNRNNAISDKIITMIPAIKGNSLDTNSKVIEGPGHTGGNLVYLQSQGHLEITCRTPNSTQSYYIRLRYATNGAGNTLPNISLTIPGVTGIPPLRLNNTFSSTNYNNLQYENFEYFQFPGTITLPLNRNIQCIFNRADVSNSILIIDKIEFIPITSSIHQNREKQKLETIQTKINTFFTNHEGVAKLK

SEQ ID NO: 125 - protein, 701 aa, Artificial Sequence
  source: /note="Description of Artificial Sequence: Synthetic polypeptide"
MNPNNNKYEIIDSNTSPYPSNRSINHFRYPYTNNPNQPLQNTNYKDWLDLCQQNQQYSGNLETFASADTIAAVSAGTIVSGTLLAGVGGLTAISGPIGLIGAIIISFGTLLPIFWPQGEQDKTVWTQFIRMGEILVDTTLSETVKELKLGTLEGIRQILKSYEDGLNDWIRLKKQQAPGLPPSSQLQQAASTVKQRFENVHNDFIREIPGFQLETYKTLLLPIYTQVANMHLNLLQQGVEFADQWNADIHPSQIEPNAGTSNDYYKLLKENIPKYSNYCANTYRTGLNNLRNEPDIRWSIFNDYRRYMTITVLDTISIFSLYDIKKYRDTIGGIQGINYELTREIYTTEINFDRITSPKVQPDLYTMEYNLTRSRLRLFSFLDELIFYTANETYGNRLVGIANHNRYTYATTGTEIIYGKRTGPPTTKILRPFESYKVSIVTDRQVQPTAPFNNIYFIINQIELYLNNSPSNKLTYSAGGNLSNDKKTTDFQFPVKKDCKQITDPNCLPSYNSYSHILSQFSLYTYSYLTGLAVTTLYTGALGWTHSSVNRNNAISDKIITMIPAIKGNSLDTNSKVIEGPGHTGGNLVYLQSQGHLEITCRTPNSTQSYYIRLRYATNGAGNTLPNISLTIPGVTGIPPLRLNNTFSSTNYNNLQYENFEYFQFPGTITLPLNRNIQCIFNRADVSNSILIIDKIEFIPI

SEQ ID NO: 126 - protein, 318 aa, Bacillus sp.
LKLNKVLATTGLALTLGFTGIATNVTPTYAAVAENPNPAIENSKNDYASNNLLKFASISTTGFEKTSEERTLKAIDYVVNDNSANSEPSTRRAPTKTHSKTDSLTINASAEISVGAEMSASASIPGIASVTSKITTGLKVSTGVNKFSSETTTLSYGGDEIVAKPGQTVRVDYYLEELRTSGIMNTGTRITEIGDNLTIGYVDGDNYNESWSRNSELYTPGHSTGEDVYNVFKRLEEKNKSNAISIAQGNTSALIEVIPKGKLSDYFFIDDVAKTVSTVGAQAKFDGIAGTGLTWKTSVIDPATQQKTPISEGQVQQP

SEQ ID NO: 127 - protein, 289 aa, Artificial Sequence
  source: /note="Description of Artificial Sequence: Synthetic polypeptide"
MAVAENPNPAIENSKNDYASNNLLKFASISTTGFEKTSEERTLKAIDYVVNDNSANSEPSTRRAPTKTHSKTDSLTINASAEISVGAEMSASASIPGIASVTSKITTGLKVSTGVNKFSSETTTLSYGGDEIVAKPGQTVRVDYYLEELRTSGIMNTGTRITEIGDNLTIGYVDGDNYNESWSRNSELYTPGHSTGEDVYNVFKRLEEKNKSNAISIAQGNTSALIEVIPKGKLSDYFFIDDVAKTVSTVGAQAKFDGIAGTGLTWKTSVIDPATQQKTPISEGQVQQP

SEQ ID NO: 128 - protein, 381 aa, Bacillus sp.
MSSKDIIELFNNYSNKWSQNENGGRSEGALFLPGFEEYAVKTDIPLRTLYADIHEDWKIAPVATTTIENTSDVVQEQYITMSADVEEWGKWKFTDVASAVGNNIVEVEMPQDMVIPALGLEKVSLHLLNEEVQHSNRRTWSVKHPFQLNPRTRVTATLQVKKKEVQRSFSIERDLSGYLGVITENLVDNSHFSLHNIKRVLQRYYSPLIRITDSGATLIYKGDFSAEFTVEQMLHIKIENLDFPDMTEEYTIHNPETGNIVVVIKNPSPTGPQKRLIAVVSSAPKPLPGQSFRSSGNFGIETASLPAGTYALEWIVESQVTQPSTLHFSVARDVSGGSDPTIWKNLYSGDTTSIQTSRDFYIGGPQNATAEFQVYVYALYS

SEQ ID NO: 129 - protein, 359 aa, Bacillus sp.
MKRYKKLLMVAPLACMLGTGVVTFPTASHADAAPVASVADDTYRQGSTYSTENITQALFVRLRHGIEASPELRQKFKIADDEKIQVEQGETILNGTKYPAIDYGLRDQLSKVTASSTGTNITVNPTTVTEVEAGKIELLSYRNDTPLTQKQFTTEKSMKRIDTVTATNQYGFKLGFESNTEFKVDALVASAKQSFKASAEFNFSHTDTNTVTNEETVTFKAQEVLAASGGTTNYFTRVGKAKFSGSFQTDAALTDLKLKLPIIKKNGSMYDVVHTEEVTLTSQDIYTLFKGATYAPLPAYLSFDDNGKKVLVKNVTFNYTGEMGYNTAAQAEFIPFDQDKPKQTMSYEKYETKTQDKSL

SEQ ID NO: 130 - protein, 330 aa, Artificial Sequence
  source: /note="Description of Artificial Sequence: Synthetic polypeptide"
MDAAPVASVADDTYRQGSTYSTENITQALFVRLRHGIEASPELRQKFKIADDEKIQVEQGETILNGTKYPAIDYGLRDQLSKVTASSTGTNITVNPTTVTEVEAGKIELLSYRNDTPLTQKQFTTEKSMKRIDTVTATNQYGFKLGFESNTEFKVDALVASAKQSFKASAEFNFSHTDTNTVTNEETVTFKAQEVLAASGGTTNYFTRVGKAKFSGSFQTDAALTDLKLKLPIIKKNGSMYDVVHTEEVTLTSQDIYTLFKGATYAPLPAYLSFDDNGKKVLVKNVTFNYTGEMGYNTAAQAEFIPFDQDKPKQTMSYEKYETKTQDKSL

SEQ ID NO: 131 - protein, 592 aa, Unknown
  source: /note="Description of Unknown: Organism from environmental sample"
MRLENDKIDQIEMNEVVNKYNVEELYKLNRGVTSIIVWVAKSIGKWILKEGLGALTDIVLGKKGDPMIQIMQSVENLINQRLTQFKKLELEAEYIGFIDSINRLQDAINLVEKYENDKTSRGIEELVKAKDVIKYQLSALDILFTQRLPQFEIKEYEGISLPLFAPITTLHLTLLKDAVLNGEKWGLDASSIKYYQKSFNRLVPEYTKRAINLYDAECKKRNAEGKFIFKNAMKETLNLIYLWSLYQYEGINPTFSQSYWYTGGIVPSGDNKSWEYIYRLANGPTNEHIKDIKYFITNRSIMGDDDFLHGMHPLYNNLNKYTQRTGLLGSPGGRSHYGGGHFGKENASISDFNKTKKWWVTVGGSVVIYNGKGGYAPSTSAHYENHFVRTFSFIPYNVYSIPQFSIGDTLEHHDLNNTRSRGNVVLGFAPNNTKSFFEKGKHLIPKDVSYTIPALQFYDIQSVNNAFLKEYLEQGTDGGLEIKGNNKDETCIHYRISLENINTNQEYKTLLRFGGIGTVRIFIELDENNRIQVGEIKTTNLYDWKDYIIEGPLPKHFKNKKEVSLVIDVGASDINFSQAILIPKNKFKVLIP

SEQ ID NO: 132 - protein, 384 aa, Bacillus sp.
MNSTPKILSREKYFKQLQNQGAPDHIIKNLNLLSDRELTKLANQTSSQNELIKISPFEDLNHQLLMYTPNFDGVIISNADEPPSANVPYPKMPDNPYEMVPQEGATFTESANSWGDYLFFAVSMNQNWTIPNPAFEQGWLNSFKIPFLTYLPGYNKGDIPEFDDLSAFFAYFTKDSGTNIKKGEIVAYVGIPTKYDIVKNVLLKDSKKFRTTRYKLVDNDTITRKNTFHYSKVQTYGTSTTNTVNVGLTIGAGLKFKESIPFIASAEETLSISLALQYTWAHTVTNQETTTKTFDTFIPGKDYQYDIYQYAVYQINTQYQLTMGSTLQDYINKIAYDDRTTTGKVEAIAAYNENKNMFYFAQTPDPTPISARGTIKVGPPIRSM

SEQ ID NO: 133 - protein, 340 aa, Bacillus sp.
LTNYEIKNEELSKMRTLKKTIALASTLALAGGVVGGASPTFAQELPKSPLENFKVNNKKSDTSPVDIRAVVRNGLDLLDKKEGTRGFPYGRSYYIHLNTYSQKLDSVIEEGDPVFSDGPSEFVGSSILTNNGDIEQTLTTNSYSKQTTNSVTTTTTNGWETGMEVSAEIPIDFFKIGMKMSGKVNGTQGKSITSSENITYTATPQNIKVAPHSSVQVTVKLKHAKATGYLKYRAYNDGYLVNTDSRPYAAPVLPGKPNPWLGEFINYLKKYEDIPGVEVSPNERGVYTFGSGKYEADYGSTFEVTVTPIQKGASHTPNTKKEQLNNKTYKFEVNAQVTGH

SEQ ID NO: 134 - protein, 327 aa, Artificial Sequence
  source: /note="Description of Artificial Sequence: Synthetic polypeptide"
MRTLKKTIALASTLALAGGVVGGASPTFAQELPKSPLENFKVNNKKSDTSPVDIRAVVRNGLDLLDKKEGTRGFPYGRSYYIHLNTYSQKLDSVIEEGDPVFSDGPSEFVGSSILTNNGDIEQTLTTNSYSKQTTNSVTTTTTNGWETGMEVSAEIPIDFFKIGMKMSGKVNGTQGKSITSSENITYTATPQNIKVAPHSSVQVTVKLKHAKATGYLKYRAYNDGYLVNTDSRPYAAPVLPGKPNPWLGEFINYLKKYEDIPGVEVSPNERGVYTFGSGKYEADYGSTFEVTVTPIQKGASHTPNTKKEQLNNKTYKFEVNAQVTGH

SEQ ID NO: 135 - protein, 299 aa, Artificial Sequence
  source: /note="Description of Artificial Sequence: Synthetic polypeptide"
MQELPKSPLENFKVNNKKSDTSPVDIRAVVRNGLDLLDKKEGTRGFPYGRSYYIHLNTYSQKLDSVIEEGDPVFSDGPSEFVGSSILTNNGDIEQTLTTNSYSKQTTNSVTTTTTNGWETGMEVSAEIPIDFFKIGMKMSGKVNGTQGKSITSSENITYTATPQNIKVAPHSSVQVTVKLKHAKATGYLKYRAYNDGYLVNTDSRPYAAPVLPGKPNPWLGEFINYLKKYEDIPGVEVSPNERGVYTFGSGKYEADYGSTFEVTVTPIQKGASHTPNTKKEQLNNKTYKFEVNAQVTGH

SEQ ID NO: 136 - protein, 335 aa, Unknown
  source: /note="Description of Unknown: Organism from environmental sample"
MKKPSKKTKQILSLAMIGAIGTSFALTSPISASAAQISPTQAMAQEQGSVSISDWKDPFKKAFSVLQQKNASYYMPSGQVYYKDETLGDLTLTKVHQSSVELDGAPIVSNGKSLFVGSNILTNNSDQPKQLTSSSFTKTIENSVSNATTNGFNIGASASATFGIPLIGETSVTLSTEYNFSNTNTTTNTESISYTAPSQTIEVPAHSAVEVIVTLNTAKIDGNVKLLSLVEGRYDFSAGNSVGSGSLKEMAWRALEYDKNLDLSVQGLSYYDDKVYLVGHGKFSAEYGTQFTVNVRPVAKPTASTSNFRSAVAEGTKATNEGYTYTVKPDVKKAN

SEQ ID NO: 137 - protein, 302 aa, Artificial Sequence
  source: /note="Description of Artificial Sequence: Synthetic polypeptide"
MAQISPTQAMAQEQGSVSISDWKDPFKKAFSVLQQKNASYYMPSGQVYYKDETLGDLTLTKVHQSSVELDGAPIVSNGKSLFVGSNILTNNSDQPKQLTSSSFTKTIENSVSNATTNGFNIGASASATFGIPLIGETSVTLSTEYNFSNTNTTTNTESISYTAPSQTIEVPAHSAVEVIVTLNTAKIDGNVKLLSLVEGRYDFSAGNSVGSGSLKEMAWRALEYDKNLDLSVQGLSYYDDKVYLVGHGKFSAEYGTQFTVNVRPVAKPTASTSNFRSAVAEGTKATNEGYTYTVKPDVKKAN

SEQ ID NO: 138 - protein, 359 aa, Unknown
  source: /note="Description of Unknown: Organism from environmental sample"
MEIKKDTYYKMVNRNSGLVADVAGRSTSNSAYLEQYPWQGETFQQWLVFQLNGGLSAIVNRNSGLIADVAGRSTSNSAHLEQYPWQGETFQQWSFEEVDGYYKIVNQNSGLVADVTGRSTSNSTHLEQYQWQNETFQQWSLEEVETIALPSVDTQELPDPPQYTSLDDNLPDSTDPVITAYTLMPCIMVDDNGWSAVSKINQGPYYMLTKTQYWKKIDSHTFAPSAQYTSKTTYGMSEEDQESMTQTTSISVTADAGFSFGKMSSSISGTVTNELQVSQSTTTDKMTTQENDETITNDHDYEVAWSLYALVTEYELKRADGTSVTSPWTVINKHDERESYYPLDSPPVPTSQANLKIVK

SEQ ID NO: 139 - protein, 292 aa, Lysinibacillus sp.
MKSNKIILCAMMTSFLFVTGNIYTAKATEIPENTHNIIKQQGVSIEDIDKKIDNMIASIPPLFGFLPYNRFPYMFGESVDVSGINIENTNVTSVVPLFIGSNTFENRTDRLITYNTSSFSKSITDSTTTQTLHGFKTAFEASGKVGIPLVTEGQIKTTLEYNFSNTDSTTKSVTTTYTATPQPIPVPPYTKTRTDVYLNQVSISGNVEIYADAITGIKAESSGTVISIGAGLDLASNTYGLIRSPKDPDRVRAIGSGKFNLIHGADFFAITYDITYGEASARIIDVREFSLK

SEQ ID NO: 140 - protein, 266 aa, Artificial Sequence
  source: /note="Description of Artificial Sequence: Synthetic polypeptide"
MTEIPENTHNIIKQQGVSIEDIDKKIDNMIASIPPLFGFLPYNRFPYMFGESVDVSGINIENTNVTSVVPLFIGSNTFENRTDRLITYNTSSFSKSITDSTTTQTLHGFKTAFEASGKVGIPLVTEGQIKTTLEYNFSNTDSTTKSVTTTYTATPQPIPVPPYTKTRTDVYLNQVSISGNVEIYADAITGIKAESSGTVISIGAGLDLASNTYGLIRSPKDPDRVRAIGSGKFNLIHGADFFAITYDITYGEASARIIDVREFSLK

SEQ ID NO: 141 - protein, 697 aa, Bacillus sp.
LKFEKNFESIFQTNIRSSSQCIPHSDLFSLENFNINKKKMYLSSGPNSTKKMQESCEFNEPFGNTLRAYVTASAGLVAILAGVVNPVVAPVVVAGGVVNLFLPILWPEDSTEKDQKLMCEMGALVDKKLTDFVLEQATKQLEGLEGIISRYRAAVKIFQDNRIPRDVAAESVRAHFRSVDLAITAAIPLFRLTGYEVTLLPLYCKLANTHLLLLRDMAAFGSVYGFTSKILEFYYEELVKNIAIYTNHCVKTYDYGLELAKKQKAIINSTGNNPQYPWMFFPDPEAYEYDLNEYDYQGIENWNLYNAYRRTMTLLVLDWIALWPTFDFKLYPIHMGLKTALTREVYTNIVGYHTLGNAFYWPWETRPTLTREQIEEKFIRKPHLFTWLSDINVRKSTTNNILTGILLQTSHTLSPTFYTTSMGTTENTFSACNIVDFPIIKVDVKFNGREKINLIEFKSDKDKLNSCGYFIDRPSHPSAQCGTSCEPRLPYVFTSEVPNMDFHTIPSTAASIMKTIFPHQLSWMYVEKSAVLNDPAIDAVGCAWTHPSVDKYNRLASNAITQIPAVMAQKLDKNAQVISGPGYTGGDLVKIGKMNFFTIKVTLPINVEQEYTIRIYCANSRMAHLLINDGSESVTVAIPENKNNNLKTYGSFRLIDVPSTFKLFTKKEQYTLNFFSEIEDIIIDKIEFIPQRVLVQK

SEQ ID NO: 142 - protein, 697 aa, Artificial Sequence
  source: /note="Description of Artificial Sequence: Synthetic polypeptide"
MKFEKNFESIFQTNIRSSSQCIPHSDLFSLENFNINKKKMYLSSGPNSTKKMQESCEFNEPFGNTLRAYVTASAGLVAILAGVVNPVVAPVVVAGGVVNLFLPILWPEDSTEKDQKLMCEMGALVDKKLTDFVLEQATKQLEGLEGIISRYRAAVKIFQDNRIPRDVAAESVRAHFRSVDLAITAAIPLFRLTGYEVTLLPLYCKLANTHLLLLRDMAAFGSVYGFTSKILEFYYEELVKNIAIYTNHCVKTYDYGLELAKKQKAIINSTGNNPQYPWMFFPDPEAYEYDLNEYDYQGIENWNLYNAYRRTMTLLVLDWIALWPTFDFKLYPIHMGLKTALTREVYTNIVGYHTLGNAFYWPWETRPTLTREQIEEKFIRKPHLFTWLSDINVRKSTTNNILTGILLQTSHTLSPTFYTTSMGTTENTFSACNIVDFPIIKVDVKFNGREKINLIEFKSDKDKLNSCGYFIDRPSHPSAQCGTSCEPRLPYVFTSEVPNMDFHTIPSTAASIMKTIFPHQLSWMYVEKSAVLNDPAIDAVGCAWTHPSVDKYNRLASNAITQIPAVMAQKLDKNAQVISGPGYTGGDLVKIGKMNFFTIKVTLPINVEQEYTIRIYCANSRMAHLLINDGSESVTVAIPENKNNNLKTYGSFRLIDVPSTFKLFTKKEQYTLNFFSEIEDIIIDKIEFIPQRVLVQK

SEQ ID NO: 143 - protein, 691 aa, Artificial Sequence
  source: /note="Description of Artificial Sequence: Synthetic polypeptide"
MKFEKNFESIFQTNIRSSSQCIPHSDLFSLENFNINKKKMYLSSGPNSTKKMQESCEFNEPFGNTLRAYVTASAGLVAILAGVVNPVVAPVVVAGGVVNLFLPILWPEDSTEKDQKLMCEMGALVDKKLTDFVLEQATKQLEGLEGIISRYRAAVKIFQDNRIPRDVAAESVRAHFRSVDLAITAAIPLFRLTGYEVTLLPLYCKLANTHLLLLRDMAAFGSVYGFTSKILEFYYEELVKNIAIYTNHCVKTYDYGLELAKKQKAIINSTGNNPQYPWMFFPDPEAYEYDLNEYDYQGIENWNLYNAYRRTMTLLVLDWIALWPTFDFKLYPIHMGLKTALTREVYTNIVGYHTLGNAFYWPWETRPTLTREQIEEKFIRKPHLFTWLSDINVRKSTTNNILTGILLQTSHTLSPTFYTTSMGTTENTFSACNIVDFPIIKVDVKFNGREKINLIEFKSDKDKLNSCGYFIDRPSHPSAQCGTSCEPRLPYVFTSEVPNMDFHTIPSTAASIMKTIFPHQLSWMYVEKSAVLNDPAIDAVGCAWTHPSVDKYNRLASNAITQIPAVMAQKLDKNAQVISGPGYTGGDLVKIGKMNFFTIKVTLPINVEQEYTIRIYCANSRMAHLLINDGSESVTVAIPENKNNNLKTYGSFRLIDVPSTFKLFTKKEQYTLNFFSEIEDIIIDKIEFIPQ

SEQ ID NO: 144 - protein, 317 aa, Bacillus sp.
MEITDVMQSARRYVDWDVVRNHYGRQDSIRFTPFNYRIRDSIAIPTTTTFDVKPTPEFTSFQILHNNSDSTQSQIVRISEKLTETTTHTTTQGYRLGGEITSTTTGSINANFILANVNIEQTIRLSITGEYNHSSTTSRTYTTERLWEISQPVNVPPFSRVVATLVVMKAQISIPIRLSTNIQGLGETPSFNNILFFANFQDFRNNPMFMGYEAAALADRRWPDRPSVFESGDMGGSLNLVGFGNSHTTPALYSIVRFEQLPLSGYSGETKTWYSDQIQLRNGGILTIPNFDPTTKIFSSNGIPISPEEAEGIEFTE

SEQ ID NO: 145 - protein, 272 aa, Unknown
  source: /note="Description of Unknown: Organism from environmental sample"
MTIKEELTQPQSHSLEIEDLSGEAEHGDLRAVLTSNLSGNFDQFPTKSGDFQIDSYLLDYSAPKKCWVNGITVYGDIYIGKQQWGTYTRPVFAYLQYMDTISIPQQVIQTRSYQLTKGHTKSYETSVNAKYTVGAKIGIVNVGSDISVGFSQTESWSTTQTFTNSTQLAGPGTFMVYQIIVVYAHNATSAGRNNSNVFAYNNKTNDVGSRVDLYYLSAITLDKKVIVESGQAISPLDWNTVQRNVLMENYNTASNGHFRFDWSAYDNPHRRY

SEQ ID NO: 146 - protein, 315 aa, Bacillus sp.
MRNNKKLTKRIASIAVIASVSTSFAIISPSLVDASQINTLGNSSIKGAKVNTPSIQEWEVPLQKAAEITGKSKGANKVISSVYEVNYHQFSAEADGSPIITDSENLFVGRNILNNKTDQEQTLSTSIFERTIENSVTHSTTHGFNFGTTASAKFKVPFVGETGIETTVEYNFSDTSSETTSESYTYIAPSQNIVVPANSSVEVIVRLNTVKAKGNVKLFSKLSGQLALKYNYPGVGMPSFGQANFYDTVNIASKHEELKDISANPDGNTVNIIGAGTYESKYGTDFYVDIIPIDKNGKAINKGNAYKLKPNIVKN

SEQ ID NO: 147 - protein, 282 aa, Artificial Sequence
  source: /note="Description of Artificial Sequence: Synthetic polypeptide"
MSQINTLGNSSIKGAKVNTPSIQEWEVPLQKAAEITGKSKGANKVISSVYEVNYHQFSAEADGSPIITDSENLFVGRNILNNKTDQEQTLSTSIFERTIENSVTHSTTHGFNFGTTASAKFKVPFVGETGIETTVEYNFSDTSSETTSESYTYIAPSQNIVVPANSSVEVIVRLNTVKAKGNVKLFSKLSGQLALKYNYPGVGMPSFGQANFYDTVNIASKHEELKDISANPDGNTVNIIGAGTYESKYGTDFYVDIIPIDKNGKAINKGNAYKLKPNIVKN

SEQ ID NO: 148 - protein, 332 aa, Unknown
  source: /note="Description of Unknown: Organism from environmental sample"
MKSNGAKMDNLKTSVELTEVLKNVGFFPVYNLIRCDMDTFNKAGNKWSDNGYYPFPISNKISSNCAADTGDKDDQIAYDCNLEGIDVMDVQLSVDAGKLFANTEPFYYTIQDLENKTSVEQTMTTLQYSEQVTDTTTVTKTKTIKVGTEVSVKTDLDVFDIVDVEVVAKVTVQTDWSTTTTDTHTVQKTLTVPPLQVKVPSGKGVHVKAQVLRGTLTSQDITANAKFSGAYNIKSTLDDGGPGSWHKGDIYPFLKTVSLGSPKMWEYVTDNEIVLNDDSQTVSVSGIGLLDAEFTTTNYTVVEEEYDLVTKKVEKVRTVQSGRMEIIQSKSE

SEQ ID NO: 149 - protein, 343 aa, Bacillus sp.
MRKYKKLAVAMPLAGMIMSGVGVLGGPVSSFADTMPQPTIMSGLGVLGGSGYTNLVTADHYQQFMDIMNSKEMAGEADNFEIVAMPDSGPKNIHITEAKPIDAPENTTEVMSYHNITGIQQSLKTPSKKITHKNTLAIKNGGSIKTSIESKTKFSVQVPFFAKGEEELKVGLDVTYNRESTDTAENTQEFTIPEQTLLAAPGGTTRLIYTVKSTAFSGTYNTKAIFKQKQGGKAKKFVDGKEIEGKELENWNEEQGYYFIKGLLEDKPEFGYKAPEFGDIFVFDDVNKKVYLKDGVFTFEGQAGHQSTAEAVFIPDDKTKSEVKMPLAEYNKRVANGISLYAK

SEQ ID NO: 150 - protein, 312 aa, Artificial Sequence
  source: /note="Description of Artificial Sequence: Synthetic polypeptide"
MDTMPQPTIMSGLGVLGGSGYTNLVTADHYQQFMDIMNSKEMAGEADNFEIVAMPDSGPKNIHITEAKPIDAPENTTEVMSYHNITGIQQSLKTPSKKITHKNTLAIKNGGSIKTSIESKTKFSVQVPFFAKGEEELKVGLDVTYNRESTDTAENTQEFTIPEQTLLAAPGGTTRLIYTVKSTAFSGTYNTKAIFKQKQGGKAKKFVDGKEIEGKELENWNEEQGYYFIKGLLEDKPEFGYKAPEFGDIFVFDDVNKKVYLKDGVFTFEGQAGHQSTAEAVFIPDDKTKSEVKMPLAEYNKRVANGISLYAK

SEQ ID NO: 151 - protein, 303 aa, Bacillus sp.
MTKKRITKSIVAMSTIACLSSSLSILAPNVASAAEVEKNPIVETKDQKSQNAIKNVYADIDYMLASIPVNPNLPGDKWKRTELLFGNEFSVSGINIKESNITNVEPVFLGSNVFVNDTNLDQTYNTGSFSEAITNTTTTTTQHGFKESTAGKVKVKIPFISEMELTQTLEYNFSNTNTTTTSTTTTITAPSQPVKVPANKIYKTEVYFEKKKTSGKVEMYADVLTGAISNGRLLSVGDALNYAKNKYDLIAVPSNPDMVRSKGDGTFTIEHGTNLVVKTYDITSNSRSTRSTNLVDTKVIPLN

SEQ ID NO: 152 - protein, 271 aa, Artificial Sequence
  source: /note="Description of Artificial Sequence: Synthetic polypeptide"
MAEVEKNPIVETKDQKSQNAIKNVYADIDYMLASIPVNPNLPGDKWKRTELLFGNEFSVSGINIKESNITNVEPVFLGSNVFVNDTNLDQTYNTGSFSEAITNTTTTTTQHGFKESTAGKVKVKIPFISEMELTQTLEYNFSNTNTTTTSTTTTITAPSQPVKVPANKIYKTEVYFEKKKTSGKVEMYADVLTGAISNGRLLSVGDALNYAKNKYDLIAVPSNPDMVRSKGDGTFTIEHGTNLVVKTYDITSNSRSTRSTNLVDTKVIPLN

SEQ ID NO: 153 - protein, 340 aa, Bacillus sp.
MTIINLEDLIRYKVGFLPFAALSWCDRDLYQFYRDNIWNPSKMHFYPFPISNKIKPDCSKETGGSELTCNEPSGTDKLVDTSGLEIRNYQLNVPPTAILENLSPFFFQIDNFKNDTSSTQTYTTLEYSEKLIETTTTKTTHGCKTGTKITAKQSFKIPYIGATEFAAEVFAEYNFSSEVTETTTSEKHLRVPPLNVIVKPGTGVRVTASVSRGFLQAKDARLSMELAGRFAFRYGGNLHSYGDLYPWLFTYNQVCPTQFDFNFYQNGFSFIPARSTIIFNGKTNIESTFMAALFEVTMEEYDLMRNAVIKTIVKTYDLATSTLILERVQNSPPDSLWYTT

SEQ ID NO: 154 - protein, 321 aa, Artificial Sequence
  source: /note="Description of Artificial Sequence: Synthetic polypeptide"
MALSWCDRDLYQFYRDNIWNPSKMHFYPFPISNKIKPDCSKETGGSELTCNEPSGTDKLVDTSGLEIRNYQLNVPPTAILENLSPFFFQIDNFKNDTSSTQTYTTLEYSEKLIETTTTKTTHGCKTGTKITAKQSFKIPYIGATEFAAEVFAEYNFSSEVTETTTSEKHLRVPPLNVIVKPGTGVRVTASVSRGFLQAKDARLSMELAGRFAFRYGGNLHSYGDLYPWLFTYNQVCPTQFDFNFYQNGFSFIPARSTIIFNGKTNIESTFMAALFEVTMEEYDLMRNAVIKTIVKTYDLATSTLILERVQNSPPDSLWYTT

SEQ ID NO: 155 - protein, 1217 aa, Bacillus sp.
MNQNNQNEIQIIDSSSNDFSQSNRYPRYPLAKESNYKDWLASCDESNLDRLSTPSSVQDAVLTSVNIASYILSFLSSGFIGTGLGILGVLLGQFWPSNNNAVWESFLGSVEELIDRRVRENERGHILKQFDGLKNVMSNYNGALKDWDGERNDPDLQREVHSRFDNADDAFALRMPEFRIEHFEIQSLAIYAQAATLHLLLLRDGVLNGRGWGLNDATIKRLYDKLVCLSGAYTDHCTFFYRQGLEELRSKGNWNAFNNYRRNMTIQVLDVISLFSNYDPRIYTDHTNTQLTRVIYTEPAATPAWLNYNFNTTDFQRIENDFIGSPSLSSNLYSLEASASHFDTSVRVISRTRMFRSWISSNTRFSTPWQGVSNPIVQEELERNFSNADVFEIRSTISRSSVIFLERAFGIVVAEFYGGPYPINLGSAYYPIYRNDRIPGNQPHRLYSVKSTVVGMVGNNSNCIAYGWVHNSLERTNSILPNRITQIPFVKANFTGSGTHVRSGPDHTGGSLVSMGGDAQFGMAVTSSARQRYRVRLRYAASNSVDFRLRIEPFGVDYNFTLPGGGTSFYPDLRYSSFQYITLPIEFETPDSLLNFTFALDTRTIMNGTCFFDRVEFLPVNSTALEYEGKLNLEKAKKAVDNLFTNTGKNALKIDTTDYDVDQAANIVECVTEELYAKEKMILLDEVKHAKQLSASRNLIQNGNFAFYTDEWTTSNNVSIQADNPIFKGNYLKMPGASETEGGTTRFPTYVLQKIDESKLKPYTRYKVRGFVGSSHDVRLIVERYGKEVDALLNVRNDLALNTVAPYRIEANQCQSQPYPTIHDGCLTNVIDTNSYEGAQSGHANLKKEHGMCHQSHQFDFHIDTGEVYINKNPGIWILFKISSPEGHATLDNMELIEEGPLVGESLALVKKREKKWKNEMETRWLQTKEVYEKAKGKIDALFTDAQDQALKFDTNTSHIISAEHLVQSMPYIYNKWISDVAGMNYDIYTELERRITQAYSLYESRNIIKNGNFDHGLNHWHATPHAKVQQIDGTAVLVIPNWSSNVSQNLCVEHNNGYVLRVTAKKEDMGKGYVTISDCNGNQETLMFTSCDNYVSNEITNDQSEYHFSQEMNEQRGYNPNETINEQLDYSLDQVRNEQRCYPLNTITNDPSEYHFSQEMNEQRSYNPNETINEYRNYITRTIDFFPDTDQVRIDIGETEGTFKVESIELICMKSQ

SEQ ID NO: 156 - protein, 373 aa, Bacillus sp.
VGKSMTFKVGTKYMFKNKNSRKYLDIEGNQTGNNANVQQYEYLADAPSERFFLHPLDNNYYAMINLNSGKVIDIAGNQTGNNANIQQFEWLGDAPSEYWYFHREADGHYVIESKHSGKVLDIAGNQTGNNANVQQYEYLTDAPSERFAAEEDGSVSLPSINTQPLPLVPEYETINDQLPKETERVVTAFTIVPSISVKDPHYGEDTARQIKENPYYMVVKKQWWKKQESYVLAPSERYDFVSTTGIRVTDQETATKTVSWSIGADMGFSFKGFSMGMSSQYSQELQTSISHTTEQLKEETHEHHVTNPFSERMAYSRYILTTEYCVQRKNGTIVNSPWTMTDKTNAHAVTFPKSTGNLLNESTKQISKTKSLN

SEQ ID NO: 157 - protein, 369 aa, Artificial Sequence
  source: /note="Description of Artificial Sequence: Synthetic polypeptide"
MTFKVGTKYMFKNKNSRKYLDIEGNQTGNNANVQQYEYLADAPSERFFLHPLDNNYYAMINLNSGKVIDIAGNQTGNNANIQQFEWLGDAPSEYWYFHREADGHYVIESKHSGKVLDIAGNQTGNNANVQQYEYLTDAPSERFAAEEDGSVSLPSINTQPLPLVPEYETINDQLPKETERVVTAFTIVPSISVKDPHYGEDTARQIKENPYYMVVKKQWWKKQESYVLAPSERYDFVSTTGIRVTDQETATKTVSWSIGADMGFSFKGFSMGMSSQYSQELQTSISHTTEQLKEETHEHHVTNPFSERMAYSRYILTTEYCVQRKNGTIVNSPWTMTDKTNAHAVTFPKSTGNLLNESTKQISKTKSLN

SEQ ID NO: 158 - protein, 419 aa, Bacillus sp.
MVKINSKKLIAVPLLVTGLVGGVSEVIIPTPAAYAASGINADLLPSYKDLLASNDYNTFLNNDKSGRYGNWREAIYSLHLWDNNGNVGDDLNLLYRSIVDKPVEMEDQYLAPYILIDRAKIPSIIQTLKNQDSMELSDLLNLLTTISVAGLQSSCLNIKTEDQKWLTITEPNYTNIQTLDTANVETPLINTVDVDNQTGQTVTGHAPTASVANTDTVSTTQTHSAKFGMKQTIKGGISFLGIASGNFTQEFNEEYTYSNSTQRLESKTVTLSSQPVDFPVPAGQHYQADVLFEQTKKSGIVTGTAHLGGGYRVRVGTRNNDNLDQIMDISIYKKFKAIQDLYPDLWAALKEKGIDLDDKAKQVLYTGGIGFESLQGVQVHAVVKDVNSGQTKDYKIADVEKGSNIDMTEALKSALQMKS

SEQ ID NO: 159 - protein, 396 aa, Artificial Sequence
  source: /note="Description of Artificial Sequence: Synthetic polypeptide"
MEVIIPTPAAYAASGINADLLPSYKDLLASNDYNTFLNNDKSGRYGNWREAIYSLHLWDNNGNVGDDLNLLYRSIVDKPVEMEDQYLAPYILIDRAKIPSIIQTLKNQDSMELSDLLNLLTTISVAGLQSSCLNIKTEDQKWLTITEPNYTNIQTLDTANVETPLINTVDVDNQTGQTVTGHAPTASVANTDTVSTTQTHSAKFGMKQTIKGGISFLGIASGNFTQEFNEEYTYSNSTQRLESKTVTLSSQPVDFPVPAGQHYQADVLFEQTKKSGIVTGTAHLGGGYRVRVGTRNNDNLDQIMDISIYKKFKAIQDLYPDLWAALKEKGIDLDDKAKQVLYTGGIGFESLQGVQVHAVVKDVNSGQTKDYKIADVEKGSNIDMTEALKSALQMKS

SEQ ID NO: 160 - protein, 465 aa, Erwinia sp.
MDLKTIIKNLTGNNNTPDNQHPLTDYHPKVNDPLVTAGVLLQFSTSFIPVVGGLLSQMVGLLWPQRESVSAWDQVKVQVKNLVDEEIDNEQWQQLEMLINEFKEKIAAFSDALNKKHYSYAKDLYTSLTGYFIGVENRFMIDGRLTSYAFSPLYCLTVAMVTAFRLEVINHGDKINLAEDEIESEKENIKNLLQDGIAWLKKAESAHNTLIAQALKTSLAHESQNDGVVKFIHALFTKDAYFKMHAFVFIQFWENQLAPAASAKPIQIAFPALCAGIFYKQGVAQAVAMSGAEIAQQVTPQSEEEKIIGLTLYESVESSPQDLRPTGITLTTNSGTSGLGYRGAAGDLQVSAHPLHCDDTLQEYLQSLSAQEFNFISQLTIATASGTKVAAGHNNGSLVSLTLPAPYRIARIYVPDDIVAYTYRQSGHQMAGIACGAVYDNALAAACAGRYVTQASALSAAASGE

SEQ ID NO: 161 - protein, 326 aa, Bacillus sp.
MKKLAIILPLTGILYAGGLLTDTNRSFASSLGQQNYQGYDNFDDPYRVNLRSRVLVALSARDHEEYGINAIDMINAKWDWQFQYLDGQINTDATVDSYTDSGEIELLNYRNDTNVNQNHQTVEKTVKTTENFTYSNAGGAKLGLDVEAKLGVNVPFVADGGLKVTAKTEFSYNHTSSNAVTKETMYRFPSQTIVCQAGYITRYVGKVQSANFSGTFSGKAAATGNLEIYVVNNKGERVFKTISIYDIYKYTKNEMPLQSGVELDEQKKHAIIPWNVESIYTGQGGHNAVVNVTVTPINKPGAARTMPLRNYVDKVNDGTLDEFMKR

SEQ ID NO: 162 - protein, 782 aa, Bacillus sp.
MSNNSKKSPKMVDVKQTNLFPIMKYPKLYSHRNLSVTSQLLQSQSFSHTNKFFRDICDISDSGINSMRAVSTTMSGIIWAIGGFLPYGTAIAAVGGIINVVLPVLWNESTVTEQEKIMCEVGNLIDEKIDRYAFNAATAALEGLQRVCSIYNDLVLALKDSQRKKTYHKAAEDIRIMFWNVHSSFSEAIPSFRVPDFETVLLPTYAAAATTHLIVLQDVIKFGKVYGFEEKIIEDLYITFTKLIEEYTNHCVKTYDKGLEKAKRKKANLEGNPYVGTAEYYKYQEIANWNLFNTYRRNMTLLVLDPVTTWPTLDPKIYPHTTKFMLSRKLYTDIIGVNNYNPSSSSTINEIEASYVRKPNLFTWLDQIQIYNKEFIDNKFLSGINLTYLYTGDRLKQEALLGYKNSQICSIDVSNFSIEQAKILMRTSWYGPNIYNIEFLNTQKSNICQISPTAQGTPPIIFAAPTSNIPDSVIKNPLKDVPNHKLSWICGHNIQDNAIIDYIGFEWMHPSLDFDNTVSKRKITQVPAIMAYTQERNANVIKGPGSTGGDLVELSTGGTIKINVLLPKAIQNYRLRIRCANQQKGSLIIFSDNKQIDFSISENPAYTPDLAYRSFRLVEIPYDFYLESSPDTEMHHTLYIQSIDGKVIIDKIEFIPQLIVAPFDTTGLIDAIARLYKLINWIDGKPDYEKGISFSVPDTVMDFEDFQTLRYQLEIKGVFGKVSLAQSVEYNKKEKLYYVYIDFTNLTPDGDELYISLYPVNLYVVDPEKNNVKSKLQIASRA

SEQ ID NO: 163 - protein, 648 aa, Unknown
  source: /note="Description of Unknown: Organism from environmental sample"
MNQNKDCNCNDGIQKVDMSDRYPYANDPNAALQNMDYKDWLVMGQEEELNGLDPKDGVNTAVAMVGTLMWTFGNPAFTGPLGGVICAFGLLIPILWPDEQEPQKVWEDLINHGDEFFDEKIGKTEKARAKTFIAGMKNELGKYEKALEDWKEEKNQHTAATVQEEFDDAGDYLDTKMEELKLEGYEQTLLSCYAQAALMHLNLLSQGVQYADEWCKDNPGQTSKYWREMLTKGDKSRRGRIEEYIDYCTKTYHEGLKKLRNVPKIKWPIYNKYRRDMTLAVLDLVALFPNYDVDKYPKGAKTELTREIYMTLSNRLIDSDMKFDEGERSLTRTPHLFTWLKGISYFTKEAANNNKRDCLARIGHAYKYSNNDTLYRQRHWSNKQNTFFEGKGIKITKLKVERYNTSKSDPIPNGIQYMRANVFMPADQSLESSIYDLGTSREKNNTKNDVFVSSKEPVIDDQQRYGHQLSYGLVHSQSYGNYGHVYIYSFGWTHDGVDPENTIAEDTITQIPAVKASSVNPVNKPDYVVKGPGHTGGDLVKFKGYTAIKMKCKVPKWKSYKIRIRYAANKEGKLIMHDWGNGVKTEKTLSKTYSGDDYTKYSSFEYIDFVDREFMDGDDNMHFDLYNNMANTPDTTILVDRIEFIPLD

SEQ ID NO: 164 - protein, 572 aa, Bacillus sp.
MKYKNRKDAKRKYKQALLATVATMTLGVSTLGSTTSAFAAEEDNISIISSHTLNDVGIQVEQIIPDKTLRDKFLKTFATKGTTKVGINGAFQFIKDAQKDVPNFNDTFRSLAMASTELIPYAGMVISPLIGLLWSEEGGVSAQIKEMRNQLLILMDQKLDTEYVNNLKTDFKTLNSNILTLEKSLNTNTNAVYYAGNDIYATRGNWVNHIQHSFESLIDRASSNHEVASLPLYTKLAVAHITFLKYMHEHAKGPKLKYDEQSLQHFFDKGNLEVITKKYADHIKKIYDQGLQTFNNDLEELDEKKSERTNLLKTPVNGLGKELKLKTLNARIKELEDKHLQKSEENFTASTWGDSTFQAILQGEWKIENNAWSFIDKKGVKKTDWLHLGSNCYYLNPEKSDIKNSTGDTFKPGEMVNGKIDIKDKTYYFKPGTGEMATGWAKDGDKWYYFSPKDNNKNYDGTTFNKGEMMTGWVKVDGEYFFFATEKGNQNDNNDTKNAVVFNKGEMMTGWVYVKNGIATNESNSGGAWYYLNDKTEYGTIGHMLHDIKATVKNKEGKYVEHKFDEDGKMKW

SEQ ID NO: 165 - protein, 534 aa, Artificial Sequence
  source: /note="Description of Artificial Sequence: Synthetic polypeptide"
MAEEDNISIISSHTLNDVGIQVEQIIPDKTLRDKFLKTFATKGTTKVGINGAFQFIKDAQKDVPNFNDTFRSLAMASTELIPYAGMVISPLIGLLWSEEGGVSAQIKEMRNQLLILMDQKLDTEYVNNLKTDFKTLNSNILTLEKSLNTNTNAVYYAGNDIYATRGNWVNHIQHSFESLIDRASSNHEVASLPLYTKLAVAHITFLKYMHEHAKGPKLKYDEQSLQHFFDKGNLEVITKKYADHIKKIYDQGLQTFNNDLEELDEKKSERTNLLKTPVNGLGKELKLKTLNARIKELEDKHLQKSEENFTASTWGDSTFQAILQGEWKIENNAWSFIDKKGVKKTDWLHLGSNCYYLNPEKSDIKNSTGDTFKPGEMVNGKIDIKDKTYYFKPGTGEMATGWAKDGDKWYYFSPKDNNKNYDGTTFNKGEMMTGWVKVDGEYFFFATEKGNQNDNNDTKNAVVFNKGEMMTGWVYVKNGIATNESNSGGAWYYLNDKTEYGTIGHMLHDIKATVKNKEGKYVEHKFDEDGKMKW

SEQ ID NO: 166 - protein, 452 aa, Bacillus sp.
MVQIQQITSLSANNGPVFKQEKDGTFKILKDEIFSMETLKAIGSLGGDTLKQAYADSQTDGGNFNNIFRTLAMGAAALIPYGGIAISPLIGLLWPEDQTKANNQLRNLMLKIAEQTHEQIADFDKEGLGTEVKDLKEKMREFEELVNNNVVYHSNNHLTPKMYIQNKAVHLNGLFRTVIAKCQKPSYKNSGLPIYITLAISHIHFMNFIKKHGKSLLHFNDKVLHDEFLDKEKQEKYTKEYIDYLNSFANPALKAADRAVNEGLPILRFSDPPTTTIGSFVHEQFTESINAIIKEMSSNLEEVLNRTINNIAFKQAVNIKSEWTLDQNGRTFYYNLDGSIQTGWKEISTSFATRYETRLNRFMERVSLKTLLPYKWYYFSTEKNDKFEKGEMYRDTKETINGKEYQFDIYGRCLNPNGGQITGWSHQGDHGITSVQQTALKTMTEKSLTRDK

SEQ ID NO: 167 - protein, 266 aa, Bacillus sp.
MIYDKVLAWAPAFEFATNNIFSLNNIGTSNQQIDTMEVGKLVVPSGGPSNQTLVTTSKKVTTTDSFTYSNSENVKLGLSAETSVKVGVPGIGEGGTKFTLSSEFSYNHTSSNTSAKAEEITYPSQTIYGVPGYETTAVIKVSKVTFSGGETYQRRIANVQSLINSINSAGYGVIIPNGSTMYDIMKHPYSGSVQQARRDADNIMKYNFDHTNKEITFGPATMTYSGVIGHSTEMVIQYKDLKTGQINEMSPSDAKNPTIRDQKLKN

SEQ ID NO: 168 - protein, 398 aa, Bacillus sp.
MKSISKKVMAGLLIGATSLSIWAPTSDAAAPENNRYYSIHLQSNKNKVWDVFNNATYNNAGILLYGQTNRDNQQFVFFPLDGGTYAIVNKNSGKPVGIGDPIIIDDGVRRMTAFNNEGLRQTSWTGASAEQWYLREQGTSNYEFVNQGYGKVASYAWQGTLAQNWEYVDLDNSNPTDGDRVFYVSAGQVNKGNVPFHGTFSVPQLPATGTRPDAPNYTGGIDQQLPQTSNSVVVGASLVPCIMVNDNQASDYTKIHNSPYYTLVKEEYWDKTFSAVIPSGITRDYTFKTGMTSTDQQKMTDTLSMSIGADLGLKFGQQSASLKANITKTLQTEISTTNSQVSEETIASKVTSDPGTTTGYTEYQLATKYTLKRADGSIVSDPWVVKNNKITIARKNAQ

SEQ ID NO: 169 - protein, 369 aa, Artificial Sequence
  source: /note="Description of Artificial Sequence: Synthetic polypeptide"
MPENNRYYSIHLQSNKNKVWDVFNNATYNNAGILLYGQTNRDNQQFVFFPLDGGTYAIVNKNSGKPVGIGDPIIIDDGVRRMTAFNNEGLRQTSWTGASAEQWYLREQGTSNYEFVNQGYGKVASYAWQGTLAQNWEYVDLDNSNPTDGDRVFYVSAGQVNKGNVPFHGTFSVPQLPATGTRPDAPNYTGGIDQQLPQTSNSVVVGASLVPCIMVNDNQASDYTKIHNSPYYTLVKEEYWDKTFSAVIPSGITRDYTFKTGMTSTDQQKMTDTLSMSIGADLGLKFGQQSASLKANITKTLQTEISTTNSQVSEETIASKVTSDPGTTTGYTEYQLATKYTLKRADGSIVSDPWVVKNNKITIARKNAQ

SEQ ID NO: 170 - protein, 341 aa, Bacillus sp.
MYKKMKKIAPIAVLSATMLCSPASSFAAEKTPTARQSQSMEQAQGIKGYLIKDGVKTPVYKNNVALDQTNDNISYPELSANPNDPVPYEGKIKTESALPSSILYFNKFASDFDYGTYAEKTDDGHIQLGKYNPDTLERTPDNTAGLILDSSGNELSGMQKNIMKSLDNMNGTHKLQDLIDAQYKTYWDGTTLTRDTSYKNIDVGIVPKTGIYTFSKAVTSGLTTSDAIGGALTLGYKLKVKAGGGILPVEAEHEFSTQLTASYNHTITVSHQETDTRTLSNNKVADSYPYARYVGAVYQLSSTYTVNPGPALKNAPLTLAQKQFSYADSVLYLTVTPGVTG

SEQ ID NO: 171 - protein, 315 aa, Artificial Sequence
  source: /note="Description of Artificial Sequence: Synthetic polypeptide"
MAEKTPTARQSQSMEQAQGIKGYLIKDGVKTPVYKNNVALDQTNDNISYPELSANPNDPVPYEGKIKTESALPSSILYFNKFASDFDYGTYAEKTDDGHIQLGKYNPDTLERTPDNTAGLILDSSGNELSGMQKNIMKSLDNMNGTHKLQDLIDAQYKTYWDGTTLTRDTSYKNIDVGIVPKTGIYTFSKAVTSGLTTSDAIGGALTLGYKLKVKAGGGILPVEAEHEFSTQLTASYNHTITVSHQETDTRTLSNNKVADSYPYARYVGAVYQLSSTYTVNPGPALKNAPLTLAQKQFSYADSVLYLTVTPGVTG

SEQ ID NO: 172 - protein, 268 aa, Bacillus sp.
MEDKKMMNSFHDILLHYVDWWKNKQKALQAGVHYSAPNREHFALFRSKPATIYKSPRKIKELSKEVAAKTYENLGIKSKKVTIELSGYMADHATWSLVKDAQFFGIAYFTIDMSSQLSKISNTPVSLTIGETIMRSRSHQYEAADTIILKPKTKITAKLIVKQHHFTYPFIIEQGLQGYIQIIVTKHNGEIQQSFHHIAAILQKYETSYTKVTNKEATIFTHGTCRVVLSSGFYIRIKEEALYNPSFSREYNLSSERPKGNFSKLLQE

SEQ ID NO: 173 - protein, 262 aa, Artificial Sequence
  source: /note="Description of Artificial Sequence: Synthetic polypeptide"
MNSFHDILLHYVDWWKNKQKALQAGVHYSAPNREHFALFRSKPATIYKSPRKIKELSKEVAAKTYENLGIKSKKVTIELSGYMADHATWSLVKDAQFFGIAYFTIDMSSQLSKISNTPVSLTIGETIMRSRSHQYEAADTIILKPKTKITAKLIVKQHHFTYPFIIEQGLQGYIQIIVTKHNGEIQQSFHHIAAILQKYETSYTKVTNKEATIFTHGTCRVVLSSGFYIRIKEEALYNPSFSREYNLSSERPKGNFSKLLQE

SEQ ID NO: 174 - protein, 311 aa, Bacillus sp.
MAITNIESATVDFMNWDRKEQVRNPKLHGYELSNVDAKPTQTNFRVEPTPIVASYQVVENNTEVEQSRSIKFSEKEIETVSTSTTEGYKIGGGIKSTTKISVEIAFLLSGGIEQTFELSVNGEYNFSSTQTTTKTHEKVWETTDIVRVPPNSRVTATLMIFKTDISIPMKLSTSITGTKSLYGQVHNLYSSFDMDGNRTGWYTIGETYNPKWPKMPACYKSFSPKDRPKDTLNIEGAGVTYTAPGLYSIVRYDQEPLAGYRGETKRWYSNQIVLRDGSVTTIPNLNPSTGMYHYPEAGESGLIEDTLKSTL

SEQ ID NO: 175 - protein, 344 aa, Bacillus sp.
LRNHYKKLAIIVPLTSLLSLGILAPTISFAAETKTNDVTPQANSIQGYLIKDGVKTPLYQNKKQQTPKLNLEQSGSASPEFPTLPPNPDAGVPLTGTSVTELGTIGNTIYFEGNMLPDEYIGDVQKKGVLPNGKIGKHYVQKRSDGQIVIGFYDPDTLELYPAELSGWSLAEKFMPDISKVFDGTTKIKRETQYELINKTTPDRSASGSITLSSTAGITTTDAFGFALAMGWKIGAEGGLGDLAKISSEFSLNLSASYNHSIAIIKSETLSTTTSVGPVNNPNYAYNKYTIAAYQLKSTYTVIPGAGLQKFIDDHKQYLKGLASNVYKYNDKEVYVGVTPGSHQ

SEQ ID NO: 176 - protein, 344 aa, Artificial Sequence
  source: /note="Description of Artificial Sequence: Synthetic polypeptide"
MRNHYKKLAIIVPLTSLLSLGILAPTISFAAETKTNDVTPQANSIQGYLIKDGVKTPLYQNKKQQTPKLNLEQSGSASPEFPTLPPNPDAGVPLTGTSVTELGTIGNTIYFEGNMLPDEYIGDVQKKGVLPNGKIGKHYVQKRSDGQIVIGFYDPDTLELYPAELSGWSLAEKFMPDISKVFDGTTKIKRETQYELINKTTPDRSASGSITLSSTAGITTTDAFGFALAMGWKIGAEGGLGDLAKISSEFSLNLSASYNHSIAIIKSETLSTTTSVGPVNNPNYAYNKYTIAAYQLKSTYTVIPGAGLQKFIDDHKQYLKGLASNVYKYNDKEVYVGVTPGSHQ

SEQ ID NO: 177 - protein, 315 aa, Artificial Sequence
  source: /note="Description of Artificial Sequence: Synthetic polypeptide"
MAETKTNDVTPQANSIQGYLIKDGVKTPLYQNKKQQTPKLNLEQSGSASPEFPTLPPNPDAGVPLTGTSVTELGTIGNTIYFEGNMLPDEYIGDVQKKGVLPNGKIGKHYVQKRSDGQIVIGFYDPDTLELYPAELSGWSLAEKFMPDISKVFDGTTKIKRETQYELINKTTPDRSASGSITLSSTAGITTTDAFGFALAMGWKIGAEGGLGDLAKISSEFSLNLSASYNHSIAIIKSETLSTTTSVGPVNNPNYAYNKYTIAAYQLKSTYTVIPGAGLQKFIDDHKQYLKGLASNVYKYNDKEVYVGVTPGSHQ

SEQ ID NO: 178 - protein, 962 aa, Bacillus sp.
VIEMNNTIVPYNVFRNMEMSHISGTNWDKEQIINALDDMSTLEDIVYNGMNGDKNDMLLSVLKFTGMAALKTIPVVGGTISKLVSTLLFPSKIDYEDIWINLKASIDQLVDKKITEALMSQLMQELAGLAEVLKKYRNTYDVYNNNKFFRIPVDMTIGDYLIDVLIGADILFTQRIPMFQNKEYDIHFLPYFVHAAEMHIVLVRDAAIHGLEWGMDKVVHQDYKKLLKDLIQKYSKYVLDTYKKGLKEATERELVDSDFPTHYERTPYINTVRWNVINKYKRGMILTVLDFTYRWKYYHESYQKNLILNPNRTVYSDVDGAVYPYETTTKEIDELVKNRTFDYRGNLKDIRISSFDRIDSIQTTYIRENQYIESTKAGGSGGKEQLIHLKNPTGNPITTITTWSELVPSGVALHCYDGSDLGHYGHNRPSTKVTTYNHVGNKVSSIIGFGKNETGGFGSLDAMVIGFKQDDYIPENNFVPVNQNIEPITKGIDVGNFYEEKFESNIKMVDEPMFGDGVLQFENYSNNLNQCSYVTYRINTEIEGIYELHAIIGAKKQKDKIAFKMSLNEQQPENFITDSFDDGDIWDGMSLSEGLVYKRILVGHFQLKKGMNHISIHNGALQTSANIKTWNLAALELTITADSLNDPDITTLYDTDNYTGTKKFIFEDTKRLTDFNDKTSSIKVASDMSGFRVYQDYDYRGTSLDLVGGEKLSLKNHSFNNKISSVKFADMVLYHNYNYVGTKELVFDDIPELKESNDKTSSIVVSSNVLGARLFEHANYKGKYTDVIGGQKLNLKNHELDKKISSIQFVKGDNKILNGIYQIVTAINDTSVIDKHLDYDIVHLWENAGNKNQKWSIRYDSNKKAYQIENMWANDLVLTCRHISGGYDIACIPNSGHNDQYWIFEHVENGYYIIRNKELSHYVLDVSDGDPTNGTSILPHVQHDLNSPNINAQKFKFNDVNN

SEQ ID NO: 179 - protein, 959 aa, Artificial Sequence
  source: /note="Description of Artificial Sequence: Synthetic polypeptide"
MNNTIVPYNVFRNMEMSHISGTNWDKEQIINALDDMSTLEDIVYNGMNGDKNDMLLSVLKFTGMAALKTIPVVGGTISKLVSTLLFPSKIDYEDIWINLKASIDQLVDKKITEALMSQLMQELAGLAEVLKKYRNTYDVYNNNKFFRIPVDMTIGDYLIDVLIGADILFTQRIPMFQNKEYDIHFLPYFVHAAEMHIVLVRDAAIHGLEWGMDKVVHQDYKKLLKDLIQKYSKYVLDTYKKGLKEATERELVDSDFPTHYERTPYINTVRWNVINKYKRGMILTVLDFTYRWKYYHESYQKNLILNPNRTVYSDVDGAVYPYETTTKEIDELVKNRTFDYRGNLKDIRISSFDRIDSIQTTYIRENQYIESTKAGGSGGKEQLIHLKNPTGNPITTITTWSELVPSGVALHCYDGSDLGHYGHNRPSTKVTTYNHVGNKVSSIIGFGKNETGGFGSLDAMVIGFKQDDYIPENNFVPVNQNIEPITKGIDVGNFYEEKFESNIKMVDEPMFGDGVLQFENYSNNLNQCSYVTYRINTEIEGIYELHAIIGAKKQKDKIAFKMSLNEQQPENFITDSFDDGDIWDGMSLSEGLVYKRILVGHFQLKKGMNHISIHNGALQTSANIKTWNLAALELTITADSLNDPDITTLYDTDNYTGTKKFIFEDTKRLTDFNDKTSSIKVASDMSGFRVYQDYDYRGTSLDLVGGEKLSLKNHSFNNKISSVKFADMVLYHNYNYVGTKELVFDDIPELKESNDKTSSIVVSSNVLGARLFEHANYKGKYTDVIGGQKLNLKNHELDKKISSIQFVKGDNKILNGIYQIVTAINDTSVIDKHLDYDIVHLWENAGNKNQKWSIRYDSNKKAYQIENMWANDLVLTCRHISGGYDIACIPNSGHNDQYWIFEHVENGYYIIRNKELSHYVLDVSDGDPTNGTSILPHVQHDLNSPNINAQKFKFNDVNN

SEQ ID NO: 180 - protein, 573 aa, Unknown
  source: /note="Description of Unknown: Organism from environmental sample"
VMNMLIKSYNQRGRFILMKYKDRKNAKRKYKQALLATVATMTLGVSTLGSTASVFAEENTQQQQSAMAPAIDGSGGIKTDESVFKQAEDGTITVLKEKLFNINTLKAIGSLGGATLKEAWADRNAGNFNNTFRTLAMGSAALIPYGGVVISPLIGFLWPENNHAEQAKLKQLLSDIAKQTHSQIAEYDIQALTSRLNSIRDELEQFEKIMNPTGRKIAAAPSVGDGPDETRKLIARIHGNFKLLVDETQKPSYKETERPIFMVAATAHLQFLNYLALYGKDPKINYNDEGLEIAVLTPLAKAKEDYKKYAMADAKKALEAINAGAHRVREAEKTGDNTSSYSIMKAYVLGTDLLVRENFDTSINEISLKRELGIKTDFTLDREGRTFYYDPQDNKMQTGWKEISTSFAARIQGPERPSAGDERLSIGLLKGIGLPYSWYYFSPEKTDEFEKGQMYQNTIKTINGKTYAFAADGKCINPDGDEIPGWHKVGTSWYFYSNGNAKNSDGKTFAKNEQVTGWYQADGKWYYLTPTSRTNKEGTTFGEGQLVVGTLSIKDTNGKSVEYKFNNDGSLKN

SEQ ID NO: 181 - protein, 556 aa, Artificial Sequence
  source: /note="Description of Artificial Sequence: Synthetic polypeptide"
MKYKDRKNAKRKYKQALLATVATMTLGVSTLGSTASVFAEENTQQQQSAMAPAIDGSGGIKTDESVFKQAEDGTITVLKEKLFNINTLKAIGSLGGATLKEAWADRNAGNFNNTFRTLAMGSAALIPYGGVVISPLIGFLWPENNHAEQAKLKQLLSDIAKQTHSQIAEYDIQALTSRLNSIRDELEQFEKIMNPTGRKIAAAPSVGDGPDETRKLIARIHGNFKLLVDETQKPSYKETERPIFMVAATAHLQFLNYLALYGKDPKINYNDEGLEIAVLTPLAKAKEDYKKYAMADAKKALEAINAGAHRVREAEKTGDNTSSYSIMKAYVLGTDLLVRENFDTSINEISLKRELGIKTDFTLDREGRTFYYDPQDNKMQTGWKEISTSFAARIQGPERPSAGDERLSIGLLKGIGLPYSWYYFSPEKTDEFEKGQMYQNTIKTINGKTYAFAADGKCINPDGDEIPGWHKVGTSWYFYSNGNAKNSDGKTFAKNEQVTGWYQADGKWYYLTPTSRTNKEGTTFGEGQLVVGTLSIKDTNGKSVEYKFNNDGSLKN

SEQ ID NO: 182 - protein, 139 aa, Unknown
  source: /note="Description of Unknown: Organism from environmental sample"
MQTINRTLNHTYAINNGPAPIGKTVNIEGEWKKIYIFWKNHLILFLQKVGTEDIFETGIEFNISIKVGESQSQEEIQKTTTSLTVEVPTYSRCKISLIETRKEQKLFIDAPLDIYGLLSGEFSDSVSSPKEIVWFIPDE

SEQ ID NO: 183 - protein, 302 aa, Unknown
  source: /note="Description of Unknown: Organism from environmental sample"
MIKQMLISLMLIISITLCLGTTKEINAAETITDINTNLNQIGEYYYKNNLAGTKMNSMYELYEKPQSVSSEAKLDFDPNSYNFKLKQSVPKLIYIGDNIFSNTTNTDQSYVTTSYSKAVTNEVSTATTKGFNLNGQGLKFKLPLFVGSNTITAPFDSGTTEINTETTTETITSGAQTVNVPANKTFKVIVSLEEFTFNGTLDYKANGTNLYNDITAEGMWIDRWGTPYIKTYNFHESVGSEWNNLNSEQKASIKEIKINPSNNSMTVEGSAEITGTLGTRMIVKSYDITDGEYKLVRTQVIE

SEQ ID NO: 184 - protein, 276 aa, Artificial Sequence
  source: /note="Description of Artificial Sequence: Synthetic polypeptide"
MAETITDINTNLNQIGEYYYKNNLAGTKMNSMYELYEKPQSVSSEAKLDFDPNSYNFKLKQSVPKLIYIGDNIFSNTTNTDQSYVTTSYSKAVTNEVSTATTKGFNLNGQGLKFKLPLFVGSNTITAPFDSGTTEINTETTTETITSGAQTVNVPANKTFKVIVSLEEFTFNGTLDYKANGTNLYNDITAEGMWIDRWGTPYIKTYNFHESVGSEWNNLNSEQKASIKEIKINPSNNSMTVEGSAEITGTLGTRMIVKSYDITDGEYKLVRTQVIE

SEQ ID NO: 185 - protein, 718 aa, Unknown
  source: /note="Description of Unknown: Organism from environmental sample"
MQEKNSLSTGPYNTLSTSAYQQLNNLASKADGFDWEQLLKDVWHDVYNGQITRDYLQLATDNNIDYRALVTTILSYASSYIPFVGSVIGFFIPIIDLIWPPSQPDLFDILRQQIQDLINQALTTDTLNKLQALLQGWKNELDVLATEVKNLTDPKTSTIGSTVNTIHLQFVHDIPQFTLKDYAAYALPLYVQAATMHLGLLKEAISKQTDWGIRDSDKTNFLTYLKQWIVKHSENVYTLFVTGLQNIQDDESSQISSADFIYTSTLYGFDIAALWPTFDKWPTNDSPEVYPTQTDIEQTRFLFSDLVGRVDWRGYPSAGDPSTYLYGNFPGELTQISTRTWDRVDQIQQVLDRGYNQSQTYTYGDSGGAANDPINISRDNPLIGVTPRVMSPYVGIMMDFADGTSITNGGNYGYDKRVVAPDNHKVHFVFPWTDELGGQDAVINAFVFKNLHPENVIGQSNPTTGAFTIKGIPAEKGYIEDGSPLKVVQERLNGTNAVQLPLGPSLVVPITNKLAGEYHIRVRYANPSDSSIDIWQSVNAGKQTLQGGNFTFPSTKNVQDQGYVPGQNGNYRLLTLSLPDPISLPLGEIDVRLGQYTSQTQGNLFIDRIEFVPVQTLFSGPYYLYAPEGYPFSKTLWKGNTINRPISIVGTANFSSEPAVLQFYQDSTLRKEISIPGSGQNYNYPNTSIPNGFNKIVLHTNQSAGKGIRGTMTISLSN

SEQ ID NO: 186 - protein, 614 aa, Artificial Sequence
  source: /note="Description of Artificial Sequence: Synthetic polypeptide"
MQEKNSLSTGPYNTLSTSAYQQLNNLASKADGFDWEQLLKDVWHDVYNGQITRDYLQLATDNNIDYRALVTTILSYASSYIPFVGSVIGFFIPIIDLIWPPSQPDLFDILRQQIQDLINQALTTDTLNKLQALLQGWKNELDVLATEVKNLTDPKTSTIGSTVNTIHLQFVHDIPQFTLKDYAAYALPLYVQAATMHLGLLKEAISKQTDWGIRDSDKTNFLTYLKQWIVKHSENVYTLFVTGLQNIQDDESSQISSADFIYTSTLYGFDIAALWPTFDKWPTNDSPEVYPTQTDIEQTRFLFSDLVGRVDWRGYPSAGDPSTYLYGNFPGELTQISTRTWDRVDQIQQVLDRGYNQSQTYTYGDSGGAANDPINISRDNPLIGVTPRVMSPYVGIMMDFADGTSITNGGNYGYDKRVVAPDNHKVHFVFPWTDELGGQDAVINAFVFKNLHPENVIGQSNPTTGAFTIKGIPAEKGYIEDGSPLKVVQERLNGTNAVQLPLGPSLVVPITNKLAGEYHIRVRYANPSDSSIDIWQSVNAGKQTLQGGNFTFPSTKNVQDQGYVPGQNGNYRLLTLSLPDPISLPLGEIDVRLGQYTSQTQGNLFIDRIEFVPV

SEQ ID NO: 187 - protein, 405 aa, Bacillus sp.
LYSNAFRQYPHLGYLPFVNPYFYSESNIDYSYLNSVRPESYPYTTLTEMYPYSIPTETYSGIVSTEVNPYFISENYHSSTESYDDMRVISGILAIAGAAGQVAGAVNAVSSALGTINAPRSVVLQITNYTNSPLRKVREKLDHGGWAATPTAEIPPGQTLVFGAQSASWSVATGTEGSVTYAGDGVEMTVYWNNPFVGNNSCNISVTGPKSIQYVGTRVCGAGNTNAQMRYELKSLPFPVFGAIRDKWVQFQGNLGNPVDGEKPTFDGTGRAQHFQGGIVSWHPQTGAHVVWGLIGERWLAIGREKFGFPITDELATPDGRGRYNHFRAVHLQGKPESSIYWTPQTGAHEIYGAIRGKWAELGWEKSRLGYPIGPEQERPGGGRTQRFQGGSISWTPQGGAVVGA

SEQ ID NO: 188 - protein, 405 aa, Artificial Sequence
  source: /note="Description of Artificial Sequence: Synthetic polypeptide"
MYSNAFRQYPHLGYLPFVNPYFYSESNIDYSYLNSVRPESYPYTTLTEMYPYSIPTETYSGIVSTEVNPYFISENYHSSTESYDDMRVISGILAIAGAAGQVAGAVNAVSSALGTINAPRSVVLQITNYTNSPLRKVREKLDHGGWAATPTAEIPPGQTLVFGAQSASWSVATGTEGSVTYAGDGVEMTVYWNNPFVGNNSCNISVTGPKSIQYVGTRVCGAGNTNAQMRYELKSLPFPVFGAIRDKWVQFQGNLGNPVDGEKPTFDGTGRAQHFQGGIVSWHPQTGAHVVWGLIGERWLAIGREKFGFPITDELATPDGRGRYNHFRAVHLQGKPESSIYWTPQTGAHEIYGAIRGKWAELGWEKSRLGYPIGPEQERPGGGRTQRFQGGSISWTPQGGAVVGA

SEQ ID NO: 189 - protein, 662 aa, Unknown
  source: /note="Description of Unknown: Organism from environmental sample"
MKYNNINHYENNNVLPYIGLEAVALKGAMSIGSYLLGLAGKKAFKQLRYGPIGNLINSFWPDKEEPAYIWNTMLSFAQNLVRRELQNDLKIRTNQTLESIHIALDAYYKALNAWLSANKPSSGPLLNVVTKEFDNAITRTRDSMAFFKSNDSDMYTIILLPIYAQAAHFHLALIHEGIRYATEWNLPKFKEFGYYDDLTTFTIQYINHCEYWYKKGLEILYPLNIKGMGKWAERNSYRFSMTINVLDIISLFPLYDPRKYPNFFDDIYHPEKELISKFQLTRIISTEPTLHQHPYLNDDDRKICQNESSCSPTDLDEYLKLPLMFQNWLKQINFQYLAPSFAGEASYPFFVATQNLHIYTNTGNDIREGTRQGLWNFSNDIRGTVFTVQKDDYTYGLTLSAYPLNDVDKNHKVTTPYVFQKFEFLNLNKNTNSKQIRPILAGTTNSPLIEIYYGLPDVNGYEVQTPEFNFNAATHYLHSIQNCYVKVPVQGNYDIYQSYVFHWEHASMKRNDEVVNDKVTIFPAIKSDPVSSKGIQIVSYQGHTGGNLIQFTSKSELNFQINFRNSTAKYKVRLRYIAFNDVSIEYSGYFLMDNPISITLPKTSSNNNIKDLRYEDFGYADFEINTLQVSDALEIITIKSNQEFILDRIEFIPETLFNYLSN

SEQ ID NO: 190 - protein, 496 aa, Enterococcus sp.
MGVLFIMNKKTFYKKVCAGTIGLIGVSVVGLSVNAETSNVLVNKDIAISQNVDQNNFDLKDIIAFNGNAVQLDSHTARLTQSKQFQKGTISGIVSLDMNYDFLLDMDVNLGDNVNGADGVGVAFHQGAIGDIGANGGGLGIRGLKKGIGFELDTYSKAPDRDDADTSFNHAQMVGAHGGFVSTDANSGFLTALAPMQQIKFTPNTFKKLTLKWNSKQQLITADYDGQHWELKNPNIDKSKKYTFTIGAATGEHFNTHTVRINQFAAVFEKPELHANDIEILHDELFDPFDKRINLSAYDRVDGDITDKIKVVENNVDSSIPGKYQVTYEVKNSVNEVARKKINVTVKINDTWPDGQTAGWKMFSGDDIELVKDPVNALVGDYTFFADQHASVYKIFNGSEALEENATYRVTVYVKPVVDMLSDHYVKVALKEDTSSKDSRELLNTTLMRDGVLEEKGYYRLTTTFKVNKGETSPLINVENYKAGYIGSINISKVNG

SEQ ID NO: 191 - protein, 490 aa, Artificial Sequence
  source: /note="Description of Artificial Sequence: Synthetic polypeptide"
MNKKTFYKKVCAGTIGLIGVSVVGLSVNAETSNVLVNKDIAISQNVDQNNFDLKDIIAFNGNAVQLDSHTARLTQSKQFQKGTISGIVSLDMNYDFLLDMDVNLGDNVNGADGVGVAFHQGAIGDIGANGGGLGIRGLKKGIGFELDTYSKAPDRDDADTSFNHAQMVGAHGGFVSTDANSGFLTALAPMQQIKFTPNTFKKLTLKWNSKQQLITADYDGQHWELKNPNIDKSKKYTFTIGAATGEHFNTHTVRINQFAAVFEKPELHANDIEILHDELFDPFDKRINLSAYDRVDGDITDKIKVVENNVDSSIPGKYQVTYEVKNSVNEVARKKINVTVKINDTWPDGQTAGWKMFSGDDIELVKDPVNALVGDYTFFADQHASVYKIFNGSEALEENATYRVTVYVKPVVDMLSDHYVKVALKEDTSSKDSRELLNTTLMRDGVLEEKGYYRLTTTFKVNKGETSPLINVENYKAGYIGSINISKVNG

SEQ ID NO: 192 - protein, 462 aa, Artificial Sequence
  source: /note="Description of Artificial Sequence: Synthetic polypeptide"
METSNVLVNKDIAISQNVDQNNFDLKDIIAFNGNAVQLDSHTARLTQSKQFQKGTISGIVSLDMNYDFLLDMDVNLGDNVNGADGVGVAFHQGAIGDIGANGGGLGIRGLKKGIGFELDTYSKAPDRDDADTSFNHAQMVGAHGGFVSTDANSGFLTALAPMQQIKFTPNTFKKLTLKWNSKQQLITADYDGQHWELKNPNIDKSKKYTFTIGAATGEHFNTHTVRINQFAAVFEKPELHANDIEILHDELFDPFDKRINLSAYDRVDGDITDKIKVVENNVDSSIPGKYQVTYEVKNSVNEVARKKINVTVKINDTWPDGQTAGWKMFSGDDIELVKDPVNALVGDYTFFADQHASVYKIFNGSEALEENATYRVTVYVKPVVDMLSDHYVKVALKEDTSSKDSRELLNTTLMRDGVLEEKGYYRLTTTFKVNKGETSPLINVENYKAGYIGSINISKVNG

SEQ ID NO: 193 - protein, 582 aa, Bacillus sp.
MSYFWRNLGKGCDELIYYTYIPHSPDYPYLYYPPYYNNRTTYPINPYHNAYSYYNYHASPYPYLENAESHEDTRIIAEIVAIAGGAAAVSEAISKVKSALSIINPPRSVILIFENHTNTTLRKVRENFEHGGWAVPPEGEIPPNSALIFGARSSAGSIATGTEGRITYAGDGIEVTLYWDNPFIGSNECNITISGPKAAQYRVHHACGAGDTDAQMRYELYSEVPTPTPAAKRPSANNSKNISAVSRIPNSMEIWWVGANGSVQDAFWYEGQPWRRQETAPAGSASTTGSITAVSRIPGSMEIWWIGANGSVQSAFWYEGQPWRRQETAPAGSASTTGGITAVSRIPGSMEVWWIGANGSVQSAFWYEGQPWRRQETAPAGSASTTGGITAVSRIPNSMEVWWIGANGSVQSAFWYEGQPWRRQETAPAGSASTTGGITAVSRIPNSMEVWWIGANGSVQSAFWYEGQPWRRQETAPAGSASTTGGITAVSRIPNSMEVWWIGANGSVQSAFWYEGQPWRRQETAPAGSASTTGGITAVSRIPNSMEVWWIGANGSVQDAFWYEGQPWRRQEIAPAGSASTS

SEQ ID NO: 194 - protein, 314 aa, Bacillus sp.
MKRMKKIIPAAFVLSSALLVAPGFSSAATDTTNVGNLPVVISSQEGKAPMTAEQVAQNGTQLPYIPTGPYEEFPGQWHVSTEEGKVIDYVYVDVVAKYDGARVYGLKNTPNFPHKIVKADGTWLKDGEEYEKTGNKGDVLYSIAISKTDPIVADTKLKKDLSWKLIDSNVIDKNSGYHWSKAVTSGISHNISVGLSQTIGMEAGIKGLVNVSTSLTWSFGYQHTISEESTVTKTFDFNPKSDYAYDQYRTALYQQVANYSIIPGAGLQNWMSDRTANEPINKVLRMVGKGDALEYKVKKSVEYPVDVLVALTSK

SEQ ID NO: 195 - protein, 288 aa, Artificial Sequence
  source: /note="Description of Artificial Sequence: Synthetic polypeptide"
MATDTTNVGNLPVVISSQEGKAPMTAEQVAQNGTQLPYIPTGPYEEFPGQWHVSTEEGKVIDYVYVDVVAKYDGARVYGLKNTPNFPHKIVKADGTWLKDGEEYEKTGNKGDVLYSIAISKTDPIVADTKLKKDLSWKLIDSNVIDKNSGYHWSKAVTSGISHNISVGLSQTIGMEAGIKGLVNVSTSLTWSFGYQHTISEESTVTKTFDFNPKSDYAYDQYRTALYQQVANYSIIPGAGLQNWMSDRTANEPINKVLRMVGKGDALEYKVKKSVEYPVDVLVALTSK

SEQ ID NO: 196 - protein, 392 aa, Bacillus sp.
MNQYKKILKVIPLAGVLSTSLLIAPNNSFAATNLDMCLKQGKGYEQTCVEQNDSSDPSRIHAMYETINHLVEIDDLNEQTNWKKDSYNFIRLNYLILPSQEQGVLDRLNTIPKDNVKLQEVLKALNGYHNGTNTITGIDTLQISNPNVDKYVEAPKPDPNSDQYENIISSASNQNYTNKIIGKTQNITKTLTSSKQLTVTHSMNVGMKESMHLTLGTNFLGLLDAKNEITFEFSANYGYTNASTSVDTVSHVVNVPSEEFEIAPRTAVVKTAKLSTPVYTSKLLGTSKIKGYYTDQVNTYPTWVQLGIYNKFKVISQHNPTIWNKLKELGFDLDDQTKEVIFKGVIDMKDKKEPGSVYESKVQTYELDANGDINFNKPVGSPIVKPAKLAIQ

SEQ ID NO: 197 - protein, 363 aa, Artificial Sequence
  source: /note="Description of Artificial Sequence: Synthetic polypeptide"
MATNLDMCLKQGKGYEQTCVEQNDSSDPSRIHAMYETINHLVEIDDLNEQTNWKKDSYNFIRLNYLILPSQEQGVLDRLNTIPKDNVKLQEVLKALNGYHNGTNTITGIDTLQISNPNVDKYVEAPKPDPNSDQYENIISSASNQNYTNKIIGKTQNITKTLTSSKQLTVTHSMNVGMKESMHLTLGTNFLGLLDAKNEITFEFSANYGYTNASTSVDTVSHVVNVPSEEFEIAPRTAVVKTAKLSTPVYTSKLLGTSKIKGYYTDQVNTYPTWVQLGIYNKFKVISQHNPTIWNKLKELGFDLDDQTKEVIFKGVIDMKDKKEPGSVYESKVQTYELDANGDINFNKPVGSPIVKPAKLAIQ

SEQ ID NO: 198 - protein, 323 aa, Bacillus sp.
MMKITKYKKLLATVPLACMLSAPVIAAPVNAFAAAPTNYEETSQFSKDSFKQWLDEKISPALADPVKQIYTGASSIDLDGSYTNLGSGDINLTATTVGDGKPTFVSVGTLHNTTDVDQVLKTDSQAITNTHSFTETNAEGVALKIGAETKVSVGIPFVAEGNVTLKMEVDTSYTHTTGNTYTKTTTDTFPSQDIKAAPHGTTEMNIAIFNQEYSGVYDGYTEVTSRIGQADNINQTSTLGVMSLYDFIKKGLAKDPSISLPSYIKLDDINKRVFVKVPMSFSGVAGYHTKGEVTFTPDDPNKPAVKMSLEDYKDPVKRAQLLK

SEQ ID NO: 199 - protein, 298 aa, Artificial Sequence
  source: /note="Description of Artificial Sequence: Synthetic polypeptide"
MAPVNAFAAAPTNYEETSQFSKDSFKQWLDEKISPALADPVKQIYTGASSIDLDGSYTNLGSGDINLTATTVGDGKPTFVSVGTLHNTTDVDQVLKTDSQAITNTHSFTETNAEGVALKIGAETKVSVGIPFVAEGNVTLKMEVDTSYTHTTGNTYTKTTTDTFPSQDIKAAPHGTTEMNIAIFNQEYSGVYDGYTEVTSRIGQADNINQTSTLGVMSLYDFIKKGLAKDPSISLPSYIKLDDINKRVFVKVPMSFSGVAGYHTKGEVTFTPDDPNKPAVKMSLEDYKDPVKRAQLLK

SEQ ID NO: 200 - protein, 481 aa, Bacillus sp.
MKYKNRKDAKRKYKQALLATVATMTLGVSTLGSTASAFATEQPVQELPKAFLNDLSGELNSPSINSEEVNKIMSDAFKDSRRLNDLLRQISMGVAGKIPAVGSVVSAMVGYLYPEQDGTDSKLNALESRLTAKIEQTVDNQHVKDIKSHIKNLENAANELQTALNSVNKGTFYNGGSVKDIHGTLREKAETVDKKFKELIPFLMQEGHEIGDLPVYTKVAAAHILFLNYMKTRGTDSKLYRYDSANTVDAQFQPADRVNTYAKHIEDTFKKGDDKIRALIEQREAAISEKHHYASMPSNLSTAKKIHELDGIISGWKDLKLEDKQSIYGDLTIREGSFEAVSCKKLTYTKSGFITEEGKTYYYSPNNDFKNWNGQSFNKGEMVTGWVNLNDEYFFFATGQGNQNDNNDTATQVVFNKGEMMTGWVLIREGYAVAKDGSWYYLNDKPEYGTIGHTLIGNGYNLKNQKGETHNYNFNLKGVWE

SEQ ID NO: 201 - protein, 284 aa, Bacillus sp.
MSINLNEIISNYGNSVISPQNPFYPSLDFKGVITSTIPSNENINIQGDTIPITNIQIPVVEQPVVTQSSILSNDTSLEQSEEFTFSEATADTITTTRTDGVDYNAGIETTIGFSIGNPVTGSVSGSNKISLSTKISYTNSVAITNTKTTTWTKKYVAKAKPNTRVVAEFIVIGGKFNQDIDVDIILSGSVNYQVRWDRSGGGPSAEIHENGPIVTVPISQILTGIPNVTIRPDGTVHYKGKVNLKGEVGLRAYINLTEQSLTGVPSTTATIPVDVLSSRTILFA

SEQ ID NO: 202 - protein, 301 aa, Bacillus sp.
MLGDLTMKNLLLGTLVIILGVVNLGYSDLAFAEKSSIMYNNSNAIGYVEKSKEFLEKNEIFEFGLHSTSGLKINTHEIKDKIIDFSENDNRGNIYPQTVRSAIRTFKHTDSMTLNTSLQFSFGEELSGSIDLPILAKITGKFSAQQIINAGISKFSSNEESISYGGDVIEAHPNQLKKIEYIYKEHIYSGEINTGTPITGVGELVEIRTNNYRIPANGLKYAEIYNYFKKIKSLNVTEDIRVYKRNVNNEQYSIAYFTIPVGRFDNYFFIDDVSRMVSTAGNRALVNGISGIGLTIRTITM

SEQ ID NO: 203 - protein, 295 aa, Artificial Sequence
  source: /note="Description of Artificial Sequence: Synthetic polypeptide"
MKNLLLGTLVIILGVVNLGYSDLAFAEKSSIMYNNSNAIGYVEKSKEFLEKNEIFEFGLHSTSGLKINTHEIKDKIIDFSENDNRGNIYPQTVRSAIRTFKHTDSMTLNTSLQFSFGEELSGSIDLPILAKITGKFSAQQIINAGISKFSSNEESISYGGDVIEAHPNQLKKIEYIYKEHIYSGEINTGTPITGVGELVEIRTNNYRIPANGLKYAEIYNYFKKIKSLNVTEDIRVYKRNVNNEQYSIAYFTIPVGRFDNYFFIDDVSRMVSTAGNRALVNGISGIGLTIRTITM

SEQ ID NO: 204 - protein, 858 aa, Bacillus sp.
MNQNYSSNEYEILDNGNMGYQPRYPLAQAPGSALQNMNYKDWLDKFPIRTPVSSANSSNLSIRDSIITSTNIIAYILSVSSPVAGAAGGILGALLGLLWPVNTETIQAVWEAFMDAVETLVDQKIEDFARAQAIARLDGIKEIFELYEGTLNTLEKDPNNPDLRELVRIQFIAANTFIVGSMPLFRVQGQEVPMLTMFTEAANLHLLLLRDGSKFGASWDMDVNSIEFYQKELEDKIASYTDYCVSTYNAGLEKAKTLTADLCDLNTYPWTRYNQGFREEEKPNCSLQQINRCELQLNELHEQMSPYRADFRWSPGEYQKLEDWNLYNAFRRDMTIMVLDIVSLWPTYNPRQYTLAVKAELTREIYTDIRGTTYRSDESQNTLPAIEGRMIPPPRLFQWLRSFTFHGRTIQGNGGSGDWTSGHLVTGLQQTVQTALGPSQILPLIGTQGTTTTTLQPLDYSDGITWIDTQQWFEPRLFQYWSGGYSTDWVLRSSFGSIEEKSPFWAEGPRWRVYSPSARASEIPEHRLSWMTYEPVRPNAPFVYPQYKQLGALALGWTHQSVDSDNRIVSDKITQIPAVKGVNAEFGATVVDGPGSTGGNLVRLPTDIGSIQLRVKVRPSSSALRRPFKLRIRYASEANANLFVGKYVDAAGRYYETQNYPVNQTFSGKMTFNSFKYLDAFSFTANEEEFKIEFRCNNGGPIYIDKIEFFPTTPTPEPVVGTYQIVTALNNSSVVQGFGVIADYTYLFSNRGDTEQKWRFVYDENKQAYQIKNLLDEMHVLSLGGGADTSKALLNTFNKSSNSQYWVIKDAGNDYVYVENYENSNLVIDAPNSADATIMRVNSFTGSTNQKFKLNKLS

SEQ ID NO: 205 - protein, 713 aa, Artificial Sequence
  source: /note="Description of Artificial Sequence: Synthetic polypeptide"
MNQNYSSNEYEILDNGNMGYQPRYPLAQAPGSALQNMNYKDWLDKFPIRTPVSSANSSNLSIRDSIITSTNIIAYILSVSSPVAGAAGGILGALLGLLWPVNTETIQAVWEAFMDAVETLVDQKIEDFARAQAIARLDGIKEIFELYEGTLNTLEKDPNNPDLRELVRIQFIAANTFIVGSMPLFRVQGQEVPMLTMFTEAANLHLLLLRDGSKFGASWDMDVNSIEFYQKELEDKIASYTDYCVSTYNAGLEKAKTLTADLCDLNTYPWTRYNQGFREEEKPNCSLQQINRCELQLNELHEQMSPYRADFRWSPGEYQKLEDWNLYNAFRRDMTIMVLDIVSLWPTYNPRQYTLAVKAELTREIYTDIRGTTYRSDESQNTLPAIEGRMIPPPRLFQWLRSFTFHGRTIQGNGGSGDWTSGHLVTGLQQTVQTALGPSQILPLIGTQGTTTTTLQPLDYSDGITWIDTQQWFEPRLFQYWSGGYSTDWVLRSSFGSIEEKSPFWAEGPRWRVYSPSARASEIPEHRLSWMTYEPVRPNAPFVYPQYKQLGALALGWTHQSVDSDNRIVSDKITQIPAVKGVNAEFGATVVDGPGSTGGNLVRLPTDIGSIQLRVKVRPSSSALRRPFKLRIRYASEANANLFVGKYVDAAGRYYETQNYPVNQTFSGKMTFNSFKYLDAFSFTANEEEFKIEFRCNNGGPIYIDKIEFFPTT

SEQ ID NO: 206 - protein, 192 aa, Streptomyces sp.
LAASFRTVIEVAPAHLDEARSMDRVFQEAIAPATVNFDFEAIRAAAAAVPDSTVVRMVRGWGLKEHAPLLVMVLSLKEAVRQALPPECAEAGFWGTVERELIAAFTGLGEQRGQPGLSFYEESADRTRYYRDLFFALQDEGSGDALHALAFCVDVTVELPEEQVLGLALTDTAPFAVGLNAIVLRRPLPVAA

SEQ ID NO: 207 - protein, 192 aa, Artificial Sequence
  source: /note="Description of Artificial Sequence: Synthetic polypeptide"
MAASFRTVIEVAPAHLDEARSMDRVFQEAIAPATVNFDFEAIRAAAAAVPDSTVVRMVRGWGLKEHAPLLVMVLSLKEAVRQALPPECAEAGFWGTVERELIAAFTGLGEQRGQPGLSFYEESADRTRYYRDLFFALQDEGSGDALHALAFCVDVTVELPEEQVLGLALTDTAPFAVGLNAIVLRRPLPVAA

SEQ ID NO: 208 - protein, 273 aa, Unknown
  source: /note="Description of Unknown: Organism from environmental sample"
MTIKEELALPQSHSIDVDELSGEHEHGDIRAVLTSNLSGSFDQYPTKSGDFQIDSYLLDYSAPKQGCWVNGITVYGDIYIGKQNWGTYTRPVFAYLQYMDTISIPQQVTQTRSYQLTKGHTQSFTTSVNAKYSVGAKIGIVNIGSEISLGFSQTESWSTTQTFTESTQLTGPGTFLVYQTVMVYAHNATSAGRQNSNVFAYSKTSDVGSRIDLYYLSAITLDKKVIVESAQAISPLDWNTVQRNVLMENYNTASNNGHFSFDWSAYNDPHRRY

SEQ ID NO: 209 - protein, 697 aa, Unknown
  source: /note="Description of Unknown: Organism from environmental sample"
MKNNSYLRSGKMNFYQNKNEYEIVDSLQNNDDVSIRYPYANDSRDSMQNRINTAKEISPSSTNAFLVSMDILTRIFDLTGALGNTLAIVGIVRDIIRLINNDSGDNLLRQTEELIQQTLATQYRSAATGAVYGISRAYNRYLEFLNQWLKNPTLANGQQVNVEFGTVNTLCIQALAPQGSLSRRGFETILLPNYALAANFHLLLLRDAAQYRDRWTNHSNFNLDLNELRRSISEYRTHCTFWYQDGLNRFSRNTLNNWIQFNTYRRDMTLAVLDIAAAFPTYDPVNYPKPTNIVLTRIVYTDPLDLQSISSSFNTLENLANTVGRVSFLNQMNIYTNFYWRPHNVTRDYWGSDQSFLSDGRIRLHGYNPPTGWLTTLNMRNIDIFRVDMTSHFQPFGTDDYRGINRAEFIGTNIQNNQRTTLLYDVRTPFHTRQHSMFLPGSNSQQPNEQNYTHRLFQIVHSFRTSHNRRWVTFLHAWTHRSLTRENIIRTDQIVQIPAVKTISTNVDRAVILNYGENMMALDDLTTSLSYKLTAVDSKISNTSFKVRVRYASKNNNKLNLFLNGNPIATLNVKRTVQNNRLLTDLPYENFKYATFAGNFKLVPQSILSIFKEITNADFVLDKIELIPVHFMSSSEQTQNYNNYSQDTIDPCNKEYDTYDQNASNSYDSMYNQEYNNDYNENSGCTYKQGYNNNYPK

SEQ ID NO: 210 - protein, 619 aa, Artificial Sequence
  source: /note="Description of Artificial Sequence: Synthetic polypeptide"
MNFYQNKNEYEIVDSLQNNDDVSIRYPYANDSRDSMQNRINTAKEISPSSTNAFLVSMDILTRIFDLTGALGNTLAIVGIVRDIIRLINNDSGDNLLRQTEELIQQTLATQYRSAATGAVYGISRAYNRYLEFLNQWLKNPTLANGQQVNVEFGTVNTLCIQALAPQGSLSRRGFETILLPNYALAANFHLLLLRDAAQYRDRWTNHSNFNLDLNELRRSISEYRTHCTFWYQDGLNRFSRNTLNNWIQFNTYRRDMTLAVLDIAAAFPTYDPVNYPKPTNIVLTRIVYTDPLDLQSISSSFNTLENLANTVGRVSFLNQMNIYTNFYWRPHNVTRDYWGSDQSFLSDGRIRLHGYNPPTGWLTTLNMRNIDIFRVDMTSHFQPFGTDDYRGINRAEFIGTNIQNNQRTTLLYDVRTPFHTRQHSMFLPGSNSQQPNEQNYTHRLFQIVHSFRTSHNRRWVTFLHAWTHRSLTRENIIRTDQIVQIPAVKTISTNVDRAVILNYGENMMALDDLTTSLSYKLTAVDSKISNTSFKVRVRYASKNNNKLNLFLNGNPIATLNVKRTVQNNRLLTDLPYENFKYATFAGNFKLVPQSILSIFKEITNADFVLDKIELIPVH

SEQ ID NO: 211 - protein, 273 aa, Bacillus sp.
MERRMTMSANVTDMIELFTRYANTWSEQQGGGNSRISLILPGFEQLALSSFTHMTKYHPSTEQMVPDAKVDSHTYTNEGEVPMNINIELAGDLQKWLKLTASEGASEAGKRLLGIDLPSDLPPFLTNIPLPIGGDILSFSDMQPWGVKHPYTLDPGYKIKVTLMVKQKKINRLFEVQRTLSRYVGIHTSKPIRQHLLSLHHVSRILKNFYSPYIQVNGRNVTTTDKGELQCLYGFEQYVHIQKQKLDNSKVVEEFNIFNSQTPPKRVIYNQLL

SEQ ID NO: 212 - protein, 267 aa, Artificial Sequence
  source: /note="Description of Artificial Sequence: Synthetic polypeptide"
MSANVTDMIELFTRYANTWSEQQGGGNSRISLILPGFEQLALSSFTHMTKYHPSTEQMVPDAKVDSHTYTNEGEVPMNINIELAGDLQKWLKLTASEGASEAGKRLLGIDLPSDLPPFLTNIPLPIGGDILSFSDMQPWGVKHPYTLDPGYKIKVTLMVKQKKINRLFEVQRTLSRYVGIHTSKPIRQHLLSLHHVSRILKNFYSPYIQVNGRNVTTTDKGELQCLYGFEQYVHIQKQKLDNSKVVEEFNIFNSQTPPKRVIYNQLL

SEQ ID NO: 213 - protein, 664 aa, Unknown
  source: /note="Description of Unknown: Organism from environmental sample"
MDPNAKYEITNTKYNLSHTGNGYSRFPLDNTQYKKLQNMKYENMWAAYQKNGDYAELPTITNVDWSSASSAMIIVAGTLISIASGGTGVGAALISVGTMLPLFWSDLVGKPGENTWQNLITQGDTIYSGQNLTPYFLLAVNNEISRTYGVLDLFNDIYNYWQTPGNDNPTTRLEVATQFRNANSSIVGSLNVISNAREFNIISLSSYTNLALLHLILLRQGVLNADKWGLAREEGQYYKNLLKDRINMYINYCQSTYRTALDRLRTGTFDGAWIAFNTYRREYTISVLNIIAMFSTFDPDVYPSNFTTNTQITEKIHVPTRNSNDTFYAGFPDLKTTEAKLIPTLNLFKWLSKLEFYTSYQSGTYFLNRITNYYNYIGGTSAGSLTTKGREQLDASLDGTVLNPSVHQCEYDQILTLPILTPGYGIDRLSFTSGNLPPHTVYTAPDNNAPVNRANILPLLPPSLPPSLPPSLRPYVVPIKYRLSDMTTIDMRPYNVDLLYNFSWTVESDDNVIKGGNYITQIPAVKGNTLQNGATVREGPGHTGGALVVLGPITAQGWPAVNIKCKVSDAAANKYLYMRIRYASDSTNSTTLNFIIGGEVRNGIACPGTDADITKIDIPYNKFNTIEFQIINPKGAGSMDVSIEKASNINGTFLIDKIEFYVKS

SEQ ID NO: 214 - protein, 741 aa, Unknown
  source: /note="Description of Unknown: Organism from environmental sample"
MSSCGAPCRGGDGQADLGATVRSGAERQLRARQERAFAHAAHSVALRGPAGALAVVPDEQLDDPGSAAAQPYLGLGRRRVACHVGQGLLGDPVEDELALGIQGWQAPVDAVAYGEAGDGELGGQGAQSAGEAELFEQAGAQAPRDAADLVQAAAGGLLCEAEFLAEGGRRPVGRVLQLEQYGGKGLADLVVQLPCHALPFGLLGTQDAGAAGGTLGFEAVEHGVERPCQIGDFPGTDDVRARLAADQIGRRHGLRKPFQRGEPEEADEQCVDHQHHGGPGHHHLGLTEPHMLGHGHIRPEKQCHGHDDHGGVQQKDAPEQRHRRSSHCSVNRLPPWDPGTMPPGWGEHAGQGSLRNRYGSRPYMLTPISPLVSAWGRDQSPYAERLSVDCMAYQGSWPVSPRTERRAPPLMSHVSRRRLLTLAPAVGVATAIPVSLTAAHAAPRQGSAKTSARPLQEVTDAWGRWMARERFPASNGCRFTASTDYAKQSFLNDYHRHQVGAKYRDIIYDANAPSPVPGQVSSVATNYRNGTAVEQTVTYKQSKTTEQDLRISVTQSLKIGVTVEVSAEIPAVAKVSETTSIEASLSSTQEFTHKETQTWSVDLPLRIPPKSVVEATLVVGTQKYDIDWTATVTLRGNVAIWFNEKVDLNQDGDRHWLWFVPIEQVFRDCRQHQITDTPGYEIIADGVNAFASGTFSGGQGVSLNVNADQKPLDGSRRGSVDSRTIPIPLAPNGNRAAVSGH

SEQ ID NO: 215 - protein, 331 aa, Artificial Sequence
  source: /note="Description of Artificial Sequence: Synthetic polypeptide"
MSHVSRRRLLTLAPAVGVATAIPVSLTAAHAAPRQGSAKTSARPLQEVTDAWGRWMARERFPASNGCRFTASTDYAKQSFLNDYHRHQVGAKYRDIIYDANAPSPVPGQVSSVATNYRNGTAVEQTVTYKQSKTTEQDLRISVTQSLKIGVTVEVSAEIPAVAKVSETTSIEASLSSTQEFTHKETQTWSVDLPLRIPPKSVVEATLVVGTQKYDIDWTATVTLRGNVAIWFNEKVDLNQDGDRHWLWFVPIEQVFRDCRQHQITDTPGYEIIADGVNAFASGTFSGGQGVSLNVNADQKPLDGSRRGSVDSRTIPIPLAPNGNRAAVSGH

SEQ ID NO: 216 - protein, 276 aa, Artificial Sequence
  source: /note="Description of Artificial Sequence: Synthetic polypeptide"
MARERFPASNGCRFTASTDYAKQSFLNDYHRHQVGAKYRDIIYDANAPSPVPGQVSSVATNYRNGTAVEQTVTYKQSKTTEQDLRISVTQSLKIGVTVEVSAEIPAVAKVSETTSIEASLSSTQEFTHKETQTWSVDLPLRIPPKSVVEATLVVGTQKYDIDWTATVTLRGNVAIWFNEKVDLNQDGDRHWLWFVPIEQVFRDCRQHQITDTPGYEIIADGVNAFASGTFSGGQGVSLNVNADQKPLDGSRRGSVDSRTIPIPLAPNGNRAAVSGH

SEQ ID NO: 217 - protein, 1331 aa, Unknown
  source: /note="Description of Unknown: Organism from environmental sample"
LLMNQYYNNNDYEILDTGGRGCQTRYPFAQAPCAELDPTAFCSNTALLSGFSNNVRNALIIGTGISWAVLGVAGPYASVAAGILNVIIPYLWPEDVETTQPQFSWDQLMEATAELINKAIAAEAKRDAIDALQILEINVNHYKNALCNFRQHPDDDIYKSTLRNAFTNVEIKAREAISKLDDNPATHAIQFLPSYAEAAHIHLILLRDVVQHGESWGFTSIQVQQYYDNPPSRPGNPGMKQLLGTYTDYCVRWYNAGLQEQYQTGDWNKFNDYRTMMTLTMLDIVSFWPNYDPTVYPILPKSELTRTVYTPLLGYSGNILNPQIPIATAESNLVDIPRLFSWLRELRIDSKTKPSGVHISGRQPVIQYTLGNERIEGGFKGELGDTRETLMIPSPQVKDDVWRICTTYSCHGVEGGSAPYVHGWSFAFTKSADQALYDQSPDPGPMGLPCIKRPSYLCDPCNPCEKELPNLSIPCNDKNLYSHRFLYLGAGFEYSSIAGYSALWYFSYGWTHVSADPNNLIDAEKVTQIPAVKGYQLNGGARVIKGPGSTGGDLVELPAGAQLSVKVTSPANIRYLMRLRYASNQSTIIRIEVESETSASTPESFNVSATYSGGILTYNTFNYQDTVYIFEAPDGDIYDIKLFNEGASDFIIDKLEFIPIEGSVEEYEANQALEKARKAVNALFTNDAKNALQLKVTDYLVDQAAKLVECMSDEIYPQEKMCLLDLVKVAKRLSQARNLLNHGDFESPDWSGENGWKTSNHVSVTSGNPIFKGRYLHMPGANNPQFSDKIFPTFAYQKIDESKLKPYTRYMVRGFVGNSKDLELLVARYDKEVHKNMHVPHDIPPTNPCTGASQLREGPMLTNHIIPQDMSCDPCDAGTVMKVQQTLVKCEDPHAFSFHIDTGELDMDRDLGIWVGFKIGTVDGMATLDNLEVIEANPLTGEALARVKKREHKWKQKWTEKRMKIEKAVQAARGAIQALFTDANQNRLKPDITLNHILHAEKFVQKIPYVYNQFLLGALPLVPGETNDIFQQLSSVVTIARSLYEQRNVLRNGDFMAGLSNWRGAKGAIVQKIGNASVLVMSDWSANLSQDVCVNPEQGYILRVTAKKEGSGEGYVTISDGTDDNTETLKFTTGEEVTRMAQYDMRPPMQERYNERNMTNPPSEAYGTNGYVSNPMTNYPSDNDGTNAYPKNNNRNYQSESFGITPYGDETTMMNGPSNKYETNAYPGSTNMTNSNGGCSCGCSTNTYAGENRMGQDSSYYNGAGYGCGCRTYPNNRTDSYPMTAQDTSLSGYVTKTVEVFPEMNHICIKIGETSGTFKVESIELIQMDCE

SEQ ID NO: 218 - protein, 659 aa, Artificial Sequence
  source: /note="Description of Artificial Sequence: Synthetic polypeptide"
MNQYYNNNDYEILDTGGRGCQTRYPFAQAPCAELDPTAFCSNTALLSGFSNNVRNALIIGTGISWAVLGVAGPYASVAAGILNVIIPYLWPEDVETTQPQFSWDQLMEATAELINKAIAAEAKRDAIDALQILEINVNHYKNALCNFRQHPDDDIYKSTLRNAFTNVEIKAREAISKLDDNPATHAIQFLPSYAEAAHIHLILLRDVVQHGESWGFTSIQVQQYYDNPPSRPGNPGMKQLLGTYTDYCVRWYNAGLQEQYQTGDWNKFNDYRTMMTLTMLDIVSFWPNYDPTVYPILPKSELTRTVYTPLLGYSGNILNPQIPIATAESNLVDIPRLFSWLRELRIDSKTKPSGVHISGRQPVIQYTLGNERIEGGFKGELGDTRETLMIPSPQVKDDVWRICTTYSCHGVEGGSAPYVHGWSFAFTKSADQALYDQSPDPGPMGLPCIKRPSYLCDPCNPCEKELPNLSIPCNDKNLYSHRFLYLGAGFEYSSIAGYSALWYFSYGWTHVSADPNNLIDAEKVTQIPAVKGYQLNGGARVIKGPGSTGGDLVELPAGAQLSVKVTSPANIRYLMRLRYASNQSTIIRIEVESETSASTPESFNVSATYSGGILTYNTFNYQDTVYIFEAPDGDIYDIKLFNEGASDFIIDKLEFIPIE

SEQ ID NO: 219 - protein, 343 aa, Bacillus sp.
MKGKIKLLSKKDVAKSSIIALTTSFLLISPELTSAASNKIFNIGSEQIQPMTVPVNRDDVRGFEDLLQSYKEPFMRTLYESVDYDIAATPNIGINFLYSQQPSYDIELDTHYPDTEDSLYVGITNLSHSGGTSEQTLYSQSFSKAITETLTTSTTHGAKVGAKAGAKFKVPLVAEANGELSAEYNFAKAGTSSSTQTITYTAPSQPVKLQPGESAKVTAHLKTFQSTGKVKLRTAYKGTLAIDYKDLSGEPQQISSGMGQWIRFMHFLHNGPETFKEYLGFTFKNEDEAYQYGYGTYSATYGTKFDVKVDIFKNTNSKNKSRFTTSPIRSYSYEVTPEIIKNN

SEQ ID NO: 220 - protein, 309 aa, Artificial Sequence
  source: /note="Description of Artificial Sequence: Synthetic polypeptide"
MASNKIFNIGSEQIQPMTVPVNRDDVRGFEDLLQSYKEPFMRTLYESVDYDIAATPNIGINFLYSQQPSYDIELDTHYPDTEDSLYVGITNLSHSGGTSEQTLYSQSFSKAITETLTTSTTHGAKVGAKAGAKFKVPLVAEANGELSAEYNFAKAGTSSSTQTITYTAPSQPVKLQPGESAKVTAHLKTFQSTGKVKLRTAYKGTLAIDYKDLSGEPQQISSGMGQWIRFMHFLHNGPETFKEYLGFTFKNEDEAYQYGYGTYSATYGTKFDVKVDIFKNTNSKNKSRFTTSPIRSYSYEVTPEIIKNN

SEQ ID NO: 221 - protein, 331 aa, Bacillus sp.
MNFKKNVNLICQKTKLIRFQFIRQIGECSIRSLEVELLPLYTLVAMSHVVFLEFLRYNHDNSKIHINPDTFKHQVQPDIDGALTAYRTHVQITYATKNTQIQNNMIDIFSHHGYTLYHYHVTPDQDQKNLNLLKDRKKQLEAEFNVQMRNSNGYPVYPSEELKRIPGDIKNFEELIAERQTYYERTLGNPGFRILVPFNGWHIKDGKWYYYDNDGHIVTGWKVDDNKHVYYLDPKNNGVIVTGWKNFTLRELIQIPRFNFSAISPSVVKIVKHTNFKGDLHEIKIWFYFNKPKGEQGHIEGFAEGESIYNGTYKIGKIDYIFDHLGICQNP

SEQ ID NO: 222 - protein, 243 aa, Bacillus sp.
LQTQHVNIDGLKMDRKEAQLVNEGELVFDLGANPNLNNPNDQPLLLKIQSQKKALIKTDTITDTHDVKIGFSQNFTRKLGAHIPIVVGSSETIGEIGATQEYNVSNTNSATITESNDFITPEQQITVPPGIRAEVKLIVKTSEYKGEMDIEAGLEGTFEYGDGKYQRGVGDITVALQTLHPKAAEVLKEKGLYVTEFEKKARFKGKLPYKIKNYSDTTIEVKFYSLADGSQVNTYKAPVTLSW

SEQ ID NO: 223 - protein, 243 aa, Artificial Sequence
  source: /note="Description of Artificial Sequence: Synthetic polypeptide"
MQTQHVNIDGLKMDRKEAQLVNEGELVFDLGANPNLNNPNDQPLLLKIQSQKKALIKTDTITDTHDVKIGFSQNFTRKLGAHIPIVVGSSETIGEIGATQEYNVSNTNSATITESNDFITPEQQITVPPGIRAEVKLIVKTSEYKGEMDIEAGLEGTFEYGDGKYQRGVGDITVALQTLHPKAAEVLKEKGLYVTEFEKKARFKGKLPYKIKNYSDTTIEVKFYSLADGSQVNTYKAPVTLSW

SEQ ID NO: 224 - protein, 1219 aa, Bacillus sp.
MDDMTTISNLHSLVPYNVMVAPPLKESTWDVIKSLKKELLNGWKEWGETGYQGNFEKAINIAQDLFKTGKINSSVYIALAQNLLSFLKYAPGFDVVIPAGNAIISFIFPYLFDGGEEENKESLFFRMIINEVQKMIDTELQGYTVNDLNNYSQGLGKVAGRFSQSMQEAIGQGPKPTNSTKLFNCSNPPCTPTAKDLDAVTVAYQHVRNQVEEILPHFQNPKLSENPFIARNTILFTLPMYVTTVTLHLSIGQSYIEFMTKWKDVYTNEDDKDRLNTDLNTAKADLQKNIIKYSATVFDTYKKFLPTVSSNTKRQLQTYIKYNRVMMTQVFDTVALWPSFYSDDYNTGLQTDQTRIAFGDMIGPVEMKKKTTTEKNTTVYDEDKNYKEGNYYNLHFQLYDIFNNRLPNNDIFNYFYEGFQLNNLNIRTAGDPNCASQRNCYIDNFFATYQNYNNTPYYQTLGSSNYDMSSIHVPYQFACDIMTKTNCGGSCVEVNNANQLTYMNMQSQESQYLAYTGLNVDGNNIAGCQPVSSNPAKGGNSENDIVGTQKIQAVYGLYADNANGNLADAYSRLAFIYTLVDQDLMPQNIIGKTNDEGIDYSVRGFPAEKGTLNLTTEPLTRVLEPINSAAAVNLKPLQILALPITNLTTQNYKIRVRYASKSDVSIYFHIQTPNGDLNRGSQTLKNTENATGIAIQGYNGRYSLQSLADNVFLPSGELTVYIQNNSNSDLFLDRIEFIALSSTSTPTSSQFTTPEDLENITNQVNQLFTSSAQTELAQTVTDYGIDQVVLKVNALSDDIFGVEKKALRKLVNQAKQLSKARNVLVGGNFEKGHEWVLGREATTVADHDLFKGDHLLLPPPTMYPSYAYQKIDESKLKSNTRYTVSGFVAQSEHLEVVVSRYGKEVHDMLDVPYEEALPITSDERPNCCKPSACQCPSCNGDAPDSHFFSYSIDVGSLQSDVNLGIEFGLRIAKSNGFAKISNLEIKEDRPLTDQEIKKVQRKEQKWKKAFDKEQAELTATLQPTLNQINALYQNEDWNGSIHPHVTYQHLSDVVVPALPKQTHWFMEDREGEHVVLTQQFQQALDRAFQQIEEQNLIHNGSFTSGLTDWTVTGDAQITIYDEDPVLELAHWDASVSQTIEIIDFEEEKEYKLRVRGKGKGTVTVQHGEEELETMTFNTSNFTTQEQTFYFEGNTVDIHVQSENNTFLVDSVELIEVVEE

SEQ ID NO: 225 - protein, 1216 aa, Artificial Sequence
  source: /note="Description of Artificial Sequence: Synthetic polypeptide"
MTTISNLHSLVPYNVMVAPPLKESTWDVIKSLKKELLNGWKEWGETGYQGNFEKAINIAQDLFKTGKINSSVYIALAQNLLSFLKYAPGFDVVIPAGNAIISFIFPYLFDGGEEENKESLFFRMIINEVQKMIDTELQGYTVNDLNNYSQGLGKVAGRFSQSMQEAIGQGPKPTNSTKLFNCSNPPCTPTAKDLDAVTVAYQHVRNQVEEILPHFQNPKLSENPFIARNTILFTLPMYVTTVTLHLSIGQSYIEFMTKWKDVYTNEDDKDRLNTDLNTAKADLQKNIIKYSATVFDTYKKFLPTVSSNTKRQLQTYIKYNRVMMTQVFDTVALWPSFYSDDYNTGLQTDQTRIAFGDMIGPVEMKKKTTTEKNTTVYDEDKNYKEGNYYNLHFQLYDIFNNRLPNNDIFNYFYEGFQLNNLNIRTAGDPNCASQRNCYIDNFFATYQNYNNTPYYQTLGSSNYDMSSIHVPYQFACDIMTKTNCGGSCVEVNNANQLTYMNMQSQESQYLAYTGLNVDGNNIAGCQPVSSNPAKGGNSENDIVGTQKIQAVYGLYADNANGNLADAYSRLAFIYTLVDQDLMPQNIIGKTNDEGIDYSVRGFPAEKGTLNLTTEPLTRVLEPINSAAAVNLKPLQILALPITNLTTQNYKIRVRYASKSDVSIYFHIQTPNGDLNRGSQTLKNTENATGIAIQGYNGRYSLQSLADNVFLPSGELTVYIQNNSNSDLFLDRIEFIALSSTSTPTSSQFTTPEDLENITNQVNQLFTSSAQTELAQTVTDYGIDQVVLKVNALSDDIFGVEKKALRKLVNQAKQLSKARNVLVGGNFEKGHEWVLGREATTVADHDLFKGDHLLLPPPTMYPSYAYQKIDESKLKSNTRYTVSGFVAQSEHLEVVVSRYGKEVHDMLDVPYEEALPITSDERPNCCKPSACQCPSCNGDAPDSHFFSYSIDVGSLQSDVNLGIEFGLRIAKSNGFAKISNLEIKEDRPLTDQEIKKVQRKEQKWKKAFDKEQAELTATLQPTLNQINALYQNEDWNGSIHPHVTYQHLSDVVVPALPKQTHWFMEDREGEHVVLTQQFQQALDRAFQQIEEQNLIHNGSFTSGLTDWTVTGDAQITIYDEDPVLELAHWDASVSQTIEIIDFEEEKEYKLRVRGKGKGTVTVQHGEEELETMTFNTSNFTTQEQTFYFEGNTVDIHVQSENNTFLVDSVELIEVVEE

SEQ ID NO: 226 - protein, 737 aa, Artificial Sequence
  source: /note="Description of Artificial Sequence: Synthetic polypeptide"
MTTISNLHSLVPYNVMVAPPLKESTWDVIKSLKKELLNGWKEWGETGYQGNFEKAINIAQDLFKTGKINSSVYIALAQNLLSFLKYAPGFDVVIPAGNAIISFIFPYLFDGGEEENKESLFFRMIINEVQKMIDTELQGYTVNDLNNYSQGLGKVAGRFSQSMQEAIGQGPKPTNSTKLFNCSNPPCTPTAKDLDAVTVAYQHVRNQVEEILPHFQNPKLSENPFIARNTILFTLPMYVTTVTLHLSIGQSYIEFMTKWKDVYTNEDDKDRLNTDLNTAKADLQKNIIKYSATVFDTYKKFLPTVSSNTKRQLQTYIKYNRVMMTQVFDTVALWPSFYSDDYNTGLQTDQTRIAFGDMIGPVEMKKKTTTEKNTTVYDEDKNYKEGNYYNLHFQLYDIFNNRLPNNDIFNYFYEGFQLNNLNIRTAGDPNCASQRNCYIDNFFATYQNYNNTPYYQTLGSSNYDMSSIHVPYQFACDIMTKTNCGGSCVEVNNANQLTYMNMQSQESQYLAYTGLNVDGNNIAGCQPVSSNPAKGGNSENDIVGTQKIQAVYGLYADNANGNLADAYSRLAFIYTLVDQDLMPQNIIGKTNDEGIDYSVRGFPAEKGTLNLTTEPLTRVLEPINSAAAVNLKPLQILALPITNLTTQNYKIRVRYASKSDVSIYFHIQTPNGDLNRGSQTLKNTENATGIAIQGYNGRYSLQSLADNVFLPSGELTVYIQNNSNSDLFLDRIEFIAL

SEQ ID NO: 227 - protein, 367 aa, Unknown
  source: /note="Description of Unknown: Organism from environmental sample"
MKNKSSKIVLCTLSALMISTATTPAMPAFAAEQTPVNTISETQKSIAPFKESYIDTVQNRMKARDVESKRTGKAINLQEQIVDGWFLARFWIFKDQNSHQANRFISWFKANLASPKGYDSVVEQMGLQMEALDDMDVSNVNYASSKGETIYNGESTLKNISGTIQKMKTDSFQKDYTQTQSTSVTNGIQIGYKISVSADVPLMKENIEISTIYNLSTTGTETNTISEKYNVPSQEVLVPPGHTAVVKHDLRKMVYSGTHDLKGDLNVRFDDKEIVQKFVYPNYKPINLSDIRSAMNAIDTWNGIKPVDFYQLLGIKNHIKGENILYIDTPAKFKFNGASPYYRATITEYDKNGNPVGTRLLDPNHQL

SEQ ID NO: 228 - protein, 338 aa, Artificial Sequence
  source: /note="Description of Artificial Sequence: Synthetic polypeptide"
MAEQTPVNTISETQKSIAPFKESYIDTVQNRMKARDVESKRTGKAINLQEQIVDGWFLARFWIFKDQNSHQANRFISWFKANLASPKGYDSVVEQMGLQMEALDDMDVSNVNYASSKGETIYNGESTLKNISGTIQKMKTDSFQKDYTQTQSTSVTNGIQIGYKISVSADVPLMKENIEISTIYNLSTTGTETNTISEKYNVPSQEVLVPPGHTAVVKHDLRKMVYSGTHDLKGDLNVRFDDKEIVQKFVYPNYKPINLSDIRSAMNAIDTWNGIKPVDFYQLLGIKNHIKGENILYIDTPAKFKFNGASPYYRATITEYDKNGNPVGTRLLDPNHQL

SEQ ID NO: 229 - protein, 311 aa, Lysinibacillus sp.
VKSHNLLINKLLGCDSRMKRKYVSSGLIIVTLLGSGLIPNIVNAAEVQEHKNNILNMENTGQQGVIQNIDDTIDNMIASIPPIAGFRPYLRTPVFGEDIEYSGINFKQNNVTNVVPIFIGENTFVNNSELEQTFNTTSFSESITKSTSTSIQSGFKSAITTKGKVGIPFVAEGEVSATLEFNLSSTITDTISTTTTITANSQAVKVPPNKIYKAEVYFEKKSTSGTVEIYADVFTSVRLLNDGTIYSIGSVLDMATNKYGLIKSTNDSKRVRAKGTGNFKIEHGSELIVKIYDVTAPSTKALVETKIIPIN

SEQ ID NO: 230 - protein, 294 aa, Artificial Sequence
  source: /note="Description of Artificial Sequence: Synthetic polypeptide"
MKRKYVSSGLIIVTLLGSGLIPNIVNAAEVQEHKNNILNMENTGQQGVIQNIDDTIDNMIASIPPIAGFRPYLRTPVFGEDIEYSGINFKQNNVTNVVPIFIGENTFVNNSELEQTFNTTSFSESITKSTSTSIQSGFKSAITTKGKVGIPFVAEGEVSATLEFNLSSTITDTISTTTTITANSQAVKVPPNKIYKAEVYFEKKSTSGTVEIYADVFTSVRLLNDGTIYSIGSVLDMATNKYGLIKSTNDSKRVRAKGTGNFKIEHGSELIVKIYDVTAPSTKALVETKIIPIN

SEQ ID NO: 231 - protein, 268 aa, Artificial Sequence
  source: /note="Description of Artificial Sequence: Synthetic polypeptide"
MAEVQEHKNNILNMENTGQQGVIQNIDDTIDNMIASIPPIAGFRPYLRTPVFGEDIEYSGINFKQNNVTNVVPIFIGENTFVNNSELEQTFNTTSFSESITKSTSTSIQSGFKSAITTKGKVGIPFVAEGEVSATLEFNLSSTITDTISTTTTITANSQAVKVPPNKIYKAEVYFEKKSTSGTVEIYADVFTSVRLLNDGTIYSIGSVLDMATNKYGLIKSTNDSKRVRAKGTGNFKIEHGSELIVKIYDVTAPSTKALVETKIIPIN

SEQ ID NO: 232 - protein, 742 aa, Bacillus sp.
MKIKKREVTMIKYKNRKKARRKYKQALVTTVAAMTLSLSIGGSFSVNPTAVYAAESSSQGFKIINNTILIASDPDTQAVVSTLIGPSLIDLIKNGNVSNANFENSLKNLTFGAIAMIPYGGTFVSSILSMLWPSEDNSAQRMVEEIMKQVDGLIDQKLIDKDLVDLDSDIRGLQKALADYERSVNPYDGENHSKETNKSRAVLVKSKFETILEKCSKKGYEESELPLFTSVATAYLTFLEFLKINGEGPIFGMDKTTYASYVTNLNGFRNHTKTTNLQGLAEEYKQYIHDTGTSATDKLINKAKSIARQSSRIQPTQSFVDTRSVSGISAYLNENFKDLQRLNIIYNDKSPAAKLNDMMPATNAEVNKARQVLNDFNAVAEKLNIYNKTTLYNEAFYAVSEAISPVLTDTNMESQIKEKFAAMEPSIEDLKIIKDDIVSTRIAFSSAEQASKNLIAAETPTAIIPLDNFTKKGDGSYGSFGDEYILGVYDGNFKSGLTAVLPNLEKNKKYKLVVNAKVQNPAASQEVKLDFANKQSKEFTLNGENYQKLDLAFTTDDNPTGDNARVNMLLKNSGMPLIINSVEIVDEGPSTNQPEDKTTTPEDTTITSENTTISDANRVSLNDFVAGLGNYFKDYDCYGLTPASSPRFDGVYANIYKSLTNLEKNKKYKLVVRLRTFGSVAKVKLDFANKQSKEFTLNGDQMQTLELPFTTDNNPIGGNGAIGISVMNQDAVLIQEVGVISL

SEQ ID NO: 233 - protein, 733 aa, Artificial Sequence
  source: /note="Description of Artificial Sequence: Synthetic polypeptide"
MIKYKNRKKARRKYKQALVTTVAAMTLSLSIGGSFSVNPTAVYAAESSSQGFKIINNTILIASDPDTQAVVSTLIGPSLIDLIKNGNVSNANFENSLKNLTFGAIAMIPYGGTFVSSILSMLWPSEDNSAQRMVEEIMKQVDGLIDQKLIDKDLVDLDSDIRGLQKALADYERSVNPYDGENHSKETNKSRAVLVKSKFETILEKCSKKGYEESELPLFTSVATAYLTFLEFLKINGEGPIFGMDKTTYASYVTNLNGFRNHTKTTNLQGLAEEYKQYIHDTGTSATDKLINKAKSIARQSSRIQPTQSFVDTRSVSGISAYLNENFKDLQRLNIIYNDKSPAAKLNDMMPATNAEVNKARQVLNDFNAVAEKLNIYNKTTLYNEAFYAVSEAISPVLTDTNMESQIKEKFAAMEPSIEDLKIIKDDIVSTRIAFSSAEQASKNLIAAETPTAIIPLDNFTKKGDGSYGSFGDEYILGVYDGNFKSGLTAVLPNLEKNKKYKLVVNAKVQNPAASQEVKLDFANKQSKEFTLNGENYQKLDLAFTTDDNPTGDNARVNMLLKNSGMPLIINSVEIVDEGPSTNQPEDKTTTPEDTTITSENTTISDANRVSLNDFVAGLGNYFKDYDCYGLTPASSPRFDGVYANIYKSLTNLEKNKKYKLVVRLRTFGSVAKVKLDFANKQSKEFTLNGDQMQTLELPFTTDNNPIGGNGAIGISVMNQDAVLIQEVGVISL

SEQ ID NO: 234 - protein, 690 aa, Artificial Sequence
  source: /note="Description of Artificial Sequence: Synthetic polypeptide"
MAESSSQGFKIINNTILIASDPDTQAVVSTLIGPSLIDLIKNGNVSNANFENSLKNLTFGAIAMIPYGGTFVSSILSMLWPSEDNSAQRMVEEIMKQVDGLIDQKLIDKDLVDLDSDIRGLQKALADYERSVNPYDGENHSKETNKSRAVLVKSKFETILEKCSKKGYEESELPLFTSVATAYLTFLEFLKINGEGPIFGMDKTTYASYVTNLNGFRNHTKTTNLQGLAEEYKQYIHDTGTSATDKLINKAKSIARQSSRIQPTQSFVDTRSVSGISAYLNENFKDLQRLNIIYNDKSPAAKLNDMMPATNAEVNKARQVLNDFNAVAEKLNIYNKTTLYNEAFYAVSEAISPVLTDTNMESQIKEKFAAMEPSIEDLKIIKDDIVSTRIAFSSAEQASKNLIAAETPTAIIPLDNFTKKGDGSYGSFGDEYILGVYDGNFKSGLTAVLPNLEKNKKYKLVVNAKVQNPAASQEVKLDFANKQSKEFTLNGENYQKLDLAFTTDDNPTGDNARVNMLLKNSGMPLIINSVEIVDEGPSTNQPEDKTTTPEDTTITSENTTISDANRVSLNDFVAGLGNYFKDYDCYGLTPASSPRFDGVYANIYKSLTNLEKNKKYKLVVRLRTFGSVAKVKLDFANKQSKEFTLNGDQMQTLELPFTTDNNPIGGNGAIGISVMNQDAVLIQEVGVISL

SEQ ID NO: 235 - protein, 366 aa, Bacillus sp.
VPKPMKNIGKKLVIGTAVAGTLVTTFGVGNHSTLAEVTPVQQIAADKQRATIQNEAVDLQQILSKATKHSLYELIRQDMDLYSRYNDTVWNNGNGYFYPFPVSPKLQQVNRFDEQVFPARLDGVRLVSASVEAPPLYSTMQPLYLSVGKFENRTNLEQTYQTLEFSEAIKHSTTLTKTKSLKTGTTVTTKTDLDVFGLGGIEVSASLTVEGTWSTADAETNEYTTTLRVPPTGVRVPAGKGVKVDAEVFKGKVENAQLTAKVELQGPYKFNNGYNDYNGDVYGFLKTLQMTNDGAFRNITGGNITFNDSLKTTTVHGAGLASGDVISTSYRVVLTEYDLVTGEVTKRTPLKERKLTAKDTKLIRSL

SEQ ID NO: 236 - protein, 362 aa, Artificial Sequence
  source: /note="Description of Artificial Sequence: Synthetic polypeptide"
MKNIGKKLVIGTAVAGTLVTTFGVGNHSTLAEVTPVQQIAADKQRATIQNEAVDLQQILSKATKHSLYELIRQDMDLYSRYNDTVWNNGNGYFYPFPVSPKLQQVNRFDEQVFPARLDGVRLVSASVEAPPLYSTMQPLYLSVGKFENRTNLEQTYQTLEFSEAIKHSTTLTKTKSLKTGTTVTTKTDLDVFGLGGIEVSASLTVEGTWSTADAETNEYTTTLRVPPTGVRVPAGKGVKVDAEVFKGKVENAQLTAKVELQGPYKFNNGYNDYNGDVYGFLKTLQMTNDGAFRNITGGNITFNDSLKTTTVHGAGLASGDVISTSYRVVLTEYDLVTGEVTKRTPLKERKLTAKDTKLIRSL

SEQ ID NO: 237 - protein, 333 aa, Artificial Sequence
  source: /note="Description of Artificial Sequence: Synthetic polypeptide"
MAEVTPVQQIAADKQRATIQNEAVDLQQILSKATKHSLYELIRQDMDLYSRYNDTVWNNGNGYFYPFPVSPKLQQVNRFDEQVFPARLDGVRLVSASVEAPPLYSTMQPLYLSVGKFENRTNLEQTYQTLEFSEAIKHSTTLTKTKSLKTGTTVTTKTDLDVFGLGGIEVSASLTVEGTWSTADAETNEYTTTLRVPPTGVRVPAGKGVKVDAEVFKGKVENAQLTAKVELQGPYKFNNGYNDYNGDVYGFLKTLQMTNDGAFRNITGGNITFNDSLKTTTVHGAGLASGDVISTSYRVVLTEYDLVTGEVTKRTPLKERKLTAKDTKLIRSL

SEQ ID NO: 238 - protein, 376 aa, Bacillus sp.
MSNENNMNTSMINDENLIPSEVLASGKQISFPDFNFYNIRTFAGKYFDISKGSTDNRAFAVQYAGNNSDNQKFLIFTLDNGYSVIAAKHSGKVLDIWDTPDFPSGIPDFLVQYDFKNGDNQKFFISNDGTVAVKQDGRVLDVYDGLTSNDAPIIAYNYQGSANQKFTLEKSGSVSIKLPTTGTLPPAPDFKTNDINEELPDDTPPVITHATCMPYFMVKDPYYNAQQKIKNTPYYILVRRQYWQKVTQRILAPSDTYDYTETTGVSRTDQTSMTETTEISIGADLGFMFKGFSVGLSASITKTLSVTKSTSTTESTEITQKVVYTNPFKHQIAYAKYMLINEYYVTRANGEMITSGDASYWKVPDPSRTVARIIPR

SEQ ID NO: 239 - protein, 307 aa, Bacillus sp.
VTALYYHPFPYSNQLQNHHLYYKHNTLANPLSYHSNAYQSYDHQRNPIIYYNPYQNGSYHYRPDTIKVEVYLAGILCEQAGSGELNDLEIYGNIMANDTLLWNVDSNHHVKILESNLYPIQVTRQIILDSDQPLRIHGHLWSNHSLYYCEPYITNDRPAGAAVSGIITAIDSAGSAVEKVQNTLKGFNKPRSVVLEIDNNTDLTFTKSSEQHLYGDWAAMPPDKIPSKTAVVFGSQSPGSSSIRGTEGWMWFTAPGLAIRIYWENPIWGTKKCDVEIYGEDADKYRIDKKCSSNDIGALLRYEIYPR

SEQ ID NO: 240 - protein, 304 aa, Artificial Sequence
  source: /note="Description of Artificial Sequence: Synthetic polypeptide"
MYYHPFPYSNQLQNHHLYYKHNTLANPLSYHSNAYQSYDHQRNPIIYYNPYQNGSYHYRPDTIKVEVYLAGILCEQAGSGELNDLEIYGNIMANDTLLWNVDSNHHVKILESNLYPIQVTRQIILDSDQPLRIHGHLWSNHSLYYCEPYITNDRPAGAAVSGIITAIDSAGSAVEKVQNTLKGFNKPRSVVLEIDNNTDLTFTKSSEQHLYGDWAAMPPDKIPSKTAVVFGSQSPGSSSIRGTEGWMWFTAPGLAIRIYWENPIWGTKKCDVEIYGEDADKYRIDKKCSSNDIGALLRYEIYPR

SEQ ID NO: 241 - protein, 977 aa, Bacillus sp.
MELKKIYNCLTITAILGQLTVFPITSFAEKALKTTNQTENNVQHKQKKREEFKTGLIGQYFTDDQFKDIAFVQVGEKNRLVSKEIVKADTSHVQSMRWVGTIKPSETGNYTFSTSKNESVIMQVNGETVVKRNEEKKTIHLEKNKLYELKLEQRIEKGKSEELQFLWSKDQGKEVPIPEHQILSPNFRGNAEVTDNPKALLPTYSLFEPQTQAEQQKRSIPSSIPDMDGDTIPDVLEENGYTFKDNAIVPWNDAYVAEGYKKYTSSPRKARTAADPYTDFEKVTGNMPEATNYETRDPLVAAYPSVSVGMEKIHFSPNQIETEGNSGSKTTSVTETNSTINEVSVGGKLGVNDKGFSFEISPSYKHSWTKSTVIQNSETASWSKQIAVNPSTAAYLNANIRYYNEGTAPIYDLAPTSNFVLQNEKKSIGTITANKNTISNSLAPGKTYPAKGQAPIFINQANEAGTVKIEINGETLDKIQNGRDMIDIETTQNRGKYEIINESGRPVPGGEWDSIRTNIDAVSGEITLNLGIGKGNLDRRIAAKDSRDPEDKTPELTVKEAIKKAFDAREENGRLVYIDADKQKIVLDESVLNIVLDENTKKEVEAQLVNIQDKKIGNVKWKRGMKMTLHVPAKYFDFEKDGEFYSAYTEGGGYTGRRRARINSGMSGYSAENLQLKPYTSYTARTYVKSDNVNGLKDFVFYVDNKQGNGQGAKVNGKVNGEKWELVEIAFNTGPNPEYFSHVGIRNNGNTQLHFDDVAVTEWKQTENIEKTHEVNDWTTFCDRSMGTQRVSNVKFSKFPDQKVRYQLHFNDNTVGFILPDSSVIDKDGVRTVTIGTGSGAPATNNKFSIFAVDEKNENLKVKVAEFGEIELEKLLIEEHKVASWWRPQGYSRAYNTIGLQKLPDNLYNQIDYYKIRVNGKDIHLVPKPTPEPNVGQIMFDLYRPNGSAGYPIKDASVELWAVVKGKDIKVLYVWTP

SEQ ID NO: 242 - protein, 950 aa, Artificial Sequence
  source: /note="Description of Artificial Sequence: Synthetic polypeptide"
MEKALKTTNQTENNVQHKQKKREEFKTGLIGQYFTDDQFKDIAFVQVGEKNRLVSKEIVKADTSHVQSMRWVGTIKPSETGNYTFSTSKNESVIMQVNGETVVKRNEEKKTIHLEKNKLYELKLEQRIEKGKSEELQFLWSKDQGKEVPIPEHQILSPNFRGNAEVTDNPKALLPTYSLFEPQTQAEQQKRSIPSSIPDMDGDTIPDVLEENGYTFKDNAIVPWNDAYVAEGYKKYTSSPRKARTAADPYTDFEKVTGNMPEATNYETRDPLVAAYPSVSVGMEKIHFSPNQIETEGNSGSKTTSVTETNSTINEVSVGGKLGVNDKGFSFEISPSYKHSWTKSTVIQNSETASWSKQIAVNPSTAAYLNANIRYYNEGTAPIYDLAPTSNFVLQNEKKSIGTITANKNTISNSLAPGKTYPAKGQAPIFINQANEAGTVKIEINGETLDKIQNGRDMIDIETTQNRGKYEIINESGRPVPGGEWDSIRTNIDAVSGEITLNLGIGKGNLDRRIAAKDSRDPEDKTPELTVKEAIKKAFDAREENGRLVYIDADKQKIVLDESVLNIVLDENTKKEVEAQLVNIQDKKIGNVKWKRGMKMTLHVPAKYFDFEKDGEFYSAYTEGGGYTGRRRARINSGMSGYSAENLQLKPYTSYTARTYVKSDNVNGLKDFVFYVDNKQGNGQGAKVNGKVNGEKWELVEIAFNTGPNPEYFSHVGIRNNGNTQLHFDDVAVTEWKQTENIEKTHEVNDWTTFCDRSMGTQRVSNVKFSKFPDQKVRYQLHFNDNTVGFILPDSSVIDKDGVRTVTIGTGSGAPATNNKFSIFAVDEKNENLKVKVAEFGEIELEKLLIEEHKVASWWRPQGYSRAYNTIGLQKLPDNLYNQIDYYKIRVNGKDIHLVPKPTPEPNVGQIMFDLYRPNGSAGYPIKDASVELWAVVKGKDIKVLYVWTP

SEQ ID NO: 243 - protein, 380 aa, Bacillus sp.
MTGKRLVRKRLMGTLLVTSLLGGTSISMLPISKVYAAENSMETDFQTFLAHTSEGKYGYWRDGIYAGGFFNLSDSSLEAKAQLMQSVYLLDRSQIPGIIEQLKKQDQLELTDVFQIVTPGATLDKNVQKHPWLNVTTDSQTKINIDKTENIDSPIGTSTQLNNPTDTRATGYATSVSKRFTNTISKTNTHTVALGMKQTVKGGIDFLGIAEGDFSQEFSETYTYSNALQTLSSEETTISSQPLSIDLPARSNYEITMIFQQVKQSGTVTGTSNLSGGYSVSKDNIAFDLSVYKKFKVIQDLYPELWNVLKEKGIDVNDNAQQVVYTGGIAFESIKGAKVIASIKDLNKGQRKLEKVIPIKSGSNTDISSQLKNTIQSTVR

SEQ ID NO: 244 - protein, 345 aa, Artificial Sequence
  source: /note="Description of Artificial Sequence: Synthetic polypeptide"
MAENSMETDFQTFLAHTSEGKYGYWRDGIYAGGFFNLSDSSLEAKAQLMQSVYLLDRSQIPGIIEQLKKQDQLELTDVFQIVTPGATLDKNVQKHPWLNVTTDSQTKINIDKTENIDSPIGTSTQLNNPTDTRATGYATSVSKRFTNTISKTNTHTVALGMKQTVKGGIDFLGIAEGDFSQEFSETYTYSNALQTLSSEETTISSQPLSIDLPARSNYEITMIFQQVKQSGTVTGTSNLSGGYSVSKDNIAFDLSVYKKFKVIQDLYPELWNVLKEKGIDVNDNAQQVVYTGGIAFESIKGAKVIASIKDLNKGQRKLEKVIPIKSGSNTDISSQLKNTIQSTVR

SEQ ID NO: 245 - protein, 1259 aa, Unknown
  source: /note="Description of Unknown: Organism from environmental sample"
MRTNLTEHRKIEKGGLYMNPNCNNKHEILDTNNRSYQTRYPLANAPGVALQQMSYKDWMDRCEQESLAITFKSVITTALDITSAILGAAKSPKAKVARAAVQVLNSVIKLLWPEPEKPSEPAYDIDFIWKELIGRVEILIEEKIDQEAYNAAIGRLSGLKRALNLYQVSFELWVEDENDPELQEDVRIRFTSALFELVTTIETFKYSGQELNLLTVFVQAADFHLMLLQQGVMYGVRWGFDQRTVDSFYQNDRGEGLKNLLPKYSDYCTYWYDEGLNRAKNLKANLSDTIRYPWAANLEDMSVLQELEDWNLYNDYRRDMTILVLDLVAVWPTYDLHYYDNGNYGVQSELTRSIYSQAVGNVMGTVFTKEQYEVSFVRPPHLVTWLEKMFIQIRPKEQGAPIDATMAGVSLYYSYSGWDNTVDDILLGYPSYSSSEIRVLSKSNVIVQDQEKNRAIYNTDLQHDKLVDRFVFYQNSGEVNYAGRDNPSSYKTFAWDTDITNYSSQMTWINGPVNEGHFGYIQAYAPEWIPASCEPFNNIVDAEDVITQIPAVKARELRYGARVIKGVGNTGGDLVSIAPDGLCELYVSFPNVVRRYQVRIHYACQDPTKINLNIGDSRHDITLPSTYSGGALTYDSFGYATSEYSYLFYPDFYDEKQIVRLGNSFDISQQDVIIDKIEFIPVDIFYAEEQDLEKARQAVNALFTNDAKNALQLDVTDYAVDQAANLVECVSEEFHAQEKMILLDQVKFAKRLSQARNLLNHGDFESADWSGENGWRTSHHVSVRSDNPIFKGRYLHMPGAMSPQFSNNIYPTYVYQKVDESKLKSYTRYLVRGFVGNSKDLELLVERYGKDVHVEMDVPDDIRYSLPMNECGGFNRCKPASYQARTPHACTCKDTAVAHTDCQCKDKEKRTSTNMYTNVPADSDMYTNGFHAHKSCGCKNNDMYQNGTHPHKSCGCKDPHVFTYHIDTGCVDMEENVGLFFALKIASENGMANIDNLEIIEAQPLTGEALARVKKREQKWKQEMAQKRLRTEKAVQAAKGALQTLFTNAQYNRLKFDTLFPQIVHAEKLVQQIPYAYHLFLSGALPTVPGMNFEIIQQLLEVIGNARTLYEQRNLVRTGTFSSGTGSWKVTEGVKVQPLQDTSVLVLSEWSHEASQQLHIDPDRGYVLRVTARKEGGGKGTVTMSDCAAYTETLTFTSCDYNTSGSQTMTSGRLSGFVTKTLEIFPDTDRIRIDMGETEGTFQVESVELICMEHMEDHL

SEQ ID NO: 246 - protein, 666 aa, Artificial Sequence
  source: /note="Description of Artificial Sequence: Synthetic polypeptide"
MNPNCNNKHEILDTNNRSYQTRYPLANAPGVALQQMSYKDWMDRCEQESLAITFKSVITTALDITSAILGAAKSPKAKVARAAVQVLNSVIKLLWPEPEKPSEPAYDIDFIWKELIGRVEILIEEKIDQEAYNAAIGRLSGLKRALNLYQVSFELWVEDENDPELQEDVRIRFTSALFELVTTIETFKYSGQELNLLTVFVQAADFHLMLLQQGVMYGVRWGFDQRTVDSFYQNDRGEGLKNLLPKYSDYCTYWYDEGLNRAKNLKANLSDTIRYPWAANLEDMSVLQELEDWNLYNDYRRDMTILVLDLVAVWPTYDLHYYDNGNYGVQSELTRSIYSQAVGNVMGTVFTKEQYEVSFVRPPHLVTWLEKMFIQIRPKEQGAPIDATMAGVSLYYSYSGWDNTVDDILLGYPSYSSSEIRVLSKSNVIVQDQEKNRAIYNTDLQHDKLVDRFVFYQNSGEVNYAGRDNPSSYKTFAWDTDITNYSSQMTWINGPVNEGHFGYIQAYAPEWIPASCEPFNNIVDAEDVITQIPAVKARELRYGARVIKGVGNTGGDLVSIAPDGLCELYVSFPNVVRRYQVRIHYACQDPTKINLNIGDSRHDITLPSTYSGGALTYDSFGYATSEYSYLFYPDFYDEKQIVRLGNSFDISQQDVIIDKIEFIPVD

SEQ ID NO: 247 - protein, 220 aa, Unknown
  source: /note="Description of Unknown: Organism from environmental sample"
LDNSNPSDPDRVFNIASSGSSISLPNLPATGTRPTAPNYTGGIDQDLPQTSNSAVIGATLIPCIMVNDSQTSDYTKIHNSPYYTLIKEEYWDKAASTVLSSGATQSVAFKTGMNSTDQQKMTDTLSMQVGADLGLKFGDQTATLKSQITRTLQTEVSTSNTQVAEDTVTTTLTGEAGKTTGYTLYQLVTKYTLKRADGTVVSGSWTVKNNKVTVLRKNSQ

SEQ ID NO: 248 - protein, 220 aa, Artificial Sequence
  source: /note="Description of Artificial Sequence: Synthetic polypeptide"
MDNSNPSDPDRVFNIASSGSSISLPNLPATGTRPTAPNYTGGIDQDLPQTSNSAVIGATLIPCIMVNDSQTSDYTKIHNSPYYTLIKEEYWDKAASTVLSSGATQSVAFKTGMNSTDQQKMTDTLSMQVGADLGLKFGDQTATLKSQITRTLQTEVSTSNTQVAEDTVTTTLTGEAGKTTGYTLYQLVTKYTLKRADGTVVSGSWTVKNNKVTVLRKNSQ

SEQ ID NO: 249 - protein, 368 aa, Unknown
  source: /note="Description of Unknown: Organism from environmental sample"
VKPNQNKWYTIENNYSKLLADNVALTTDNHVPLATVAPFDPVYADLLDNRLWMFVPLNHDYYAIVNKLSGKVAYVETSGKKHVYQYYWENVNNQQWFLHDLEGGLQKIQSKHSGEVWDGDMNNEGPFLTQQLWNGRDAQRWAIREIKSFTLPSIQTSPLAPPPKYKNIDDVLPDRTEMVTTNYTLAPCIAVSDPYLNDQQKIQTNPYYLYVRKQYWRKVGSHVLAPGTKYGYKQTSGITTTDQRTVTNTVSHTFGADVGLSFGNLNTGKKSLSAALSYQYSNELSVQESRTDTELSVVEEAFTIENANNYSVAWTKYILVSQYSVHRVDGTIVNEAWTVTDYHNTYDRFYPEEGGNGIIDSRVSAEEI

SEQ ID NO: 250 - protein, 368 aa, Artificial Sequence
  source: /note="Description of Artificial Sequence: Synthetic polypeptide"
MKPNQNKWYTIENNYSKLLADNVALTTDNHVPLATVAPFDPVYADLLDNRLWMFVPLNHDYYAIVNKLSGKVAYVETSGKKHVYQYYWENVNNQQWFLHDLEGGLQKIQSKHSGEVWDGDMNNEGPFLTQQLWNGRDAQRWAIREIKSFTLPSIQTSPLAPPPKYKNIDDVLPDRTEMVTTNYTLAPCIAVSDPYLNDQQKIQTNPYYLYVRKQYWRKVGSHVLAPGTKYGYKQTSGITTTDQRTVTNTVSHTFGADVGLSFGNLNTGKKSLSAALSYQYSNELSVQESRTDTELSVVEEAFTIENANNYSVAWTKYILVSQYSVHRVDGTIVNEAWTVTDYHNTYDRFYPEEGGNGIIDSRVSAEEI

SEQ ID NO: 251 - protein, 431 aa, Pseudomonas sp.
LSNSIFQVAGMEFQFVSSFNPVWTTANDYYTGNPGSFWEPVRPDSSWKAFGSLCVPQTDNPSGTSVMLLARNLASDDQSPPPLAPPSSFTQLWTDRGTGNTGGNGACWQIIAPDGYTALGSVFNNANYSTPDPSEYVCVRNDLVAQLGTGEGVWNDQNSGATCGNLQCYDVFPSFSPPSAASPGTQVTQGSWALGSGSFLSSSQYGVPTTLTNVLVLPNAGTASPGPGENPPSLGTGVNVAPASAWQLTASLPVLFPMVNDPAKNLDWQIDNPLYSLEIWGQWTAITSLTTSTDSGSVTQTITSGVEQSSSNDWSNEVGANLEVSASSDIGLTGVVKVKLGVKIGASFSHTWSGSEGTISSQSTSLSIEVNIPPRSFGVLWQLNYRTYLRRQDNTYVGEVNSTSLLDGYGLNIGTSSYEIAITPYPAQKTG

SEQ ID NO: 252 - protein, 421 aa, Artificial Sequence
  source: /note="Description of Artificial Sequence: Synthetic polypeptide"
MEFQFVSSFNPVWTTANDYYTGNPGSFWEPVRPDSSWKAFGSLCVPQTDNPSGTSVMLLARNLASDDQSPPPLAPPSSFTQLWTDRGTGNTGGNGACWQIIAPDGYTALGSVFNNANYSTPDPSEYVCVRNDLVAQLGTGEGVWNDQNSGATCGNLQCYDVFPSFSPPSAASPGTQVTQGSWALGSGSFLSSSQYGVPTTLTNVLVLPNAGTASPGPGENPPSLGTGVNVAPASAWQLTASLPVLFPMVNDPAKNLDWQIDNPLYSLEIWGQWTAITSLTTSTDSGSVTQTITSGVEQSSSNDWSNEVGANLEVSASSDIGLTGVVKVKLGVKIGASFSHTWSGSEGTISSQSTSLSIEVNIPPRSFGVLWQLNYRTYLRRQDNTYVGEVNSTSLLDGYGLNIGTSSYEIAITPYPAQKTG

SEQ ID NO: 253 - protein, 431 aa, Artificial Sequence
  source: /note="Description of Artificial Sequence: Synthetic polypeptide"
MSNSIFQVAGMEFQFVSSFNPVWTTANDYYTGNPGSFWEPVRPDSSWKAFGSLCVPQTDNPSGTSVMLLARNLASDDQSPPPLAPPSSFTQLWTDRGTGNTGGNGACWQIIAPDGYTALGSVFNNANYSTPDPSEYVCVRNDLVAQLGTGEGVWNDQNSGATCGNLQCYDVFPSFSPPSAASPGTQVTQGSWALGSGSFLSSSQYGVPTTLTNVLVLPNAGTASPGPGENPPSLGTGVNVAPASAWQLTASLPVLFPMVNDPAKNLDWQIDNPLYSLEIWGQWTAITSLTTSTDSGSVTQTITSGVEQSSSNDWSNEVGANLEVSASSDIGLTGVVKVKLGVKIGASFSHTWSGSEGTISSQSTSLSIEVNIPPRSFGVLWQLNYRTYLRRQDNTYVGEVNSTSLLDGYGLNIGTSSYEIAITPYPAQKTG

SEQ ID NO: 254 - protein, 210 aa, Unknown
  source: /note="Description of Unknown: Organism from environmental sample"
MDNASELFRVLTSRLYNGGANQIFNMNRATNNNFRLQTQPSGAGYVLRPCNDNTTTLLNLVFTPASSGLANPNTLLSFRESERIPPVPIPSLPSPTRLSPVPDLSNLDDEGPLPQYAPRATIGSALIPCIFVNDVVPLDQRIKQSPYYVLEYRQYWHQLWSYLLPSGGSREFDEITGIRPEAQENMKDSLDIVIGADWNLRFGDKSHAFR

SEQ ID NO: 255 - protein, 124 aa, Burkholderia sp.
LETDMSARSTVVKLQNNSGNTLFLDPASINLLHGEWVTYPPEKIPDGQTGQWESDSDGFMTGTEGQLQYQFADGGGIENVRLYWDNPYVGNNGYSITVSAAGYKVGYDGGSGDNATVNFYIKKG

SEQ ID NO: 256 - protein, 120 aa, Artificial Sequence
  source: /note="Description of Artificial Sequence: Synthetic polypeptide"
MSARSTVVKLQNNSGNTLFLDPASINLLHGEWVTYPPEKIPDGQTGQWESDSDGFMTGTEGQLQYQFADGGGIENVRLYWDNPYVGNNGYSITVSAAGYKVGYDGGSGDNATVNFYIKKG

SEQ ID NO: 257 - protein, 1233 aa, Bacillus sp.
MANLSELYPIPYNTVSSEYFYQNQLDVDPNGKDRPLTKNEQLVENFKKSLKDNVKVGDLLSTGADIYKDIYNAIDKGEVDYFSLTTHILGLVSIFVPELGFLAPALGVFYRALGAGNAAPEPTMEDIFKALKPKIEEMIKQELTDDQNDFLDKEVIGLQDNLGRYRDAIRTFKAADPKNNDQVKAALRNEILTIDNLFINRTPQFLKSKYAEISLPYFAMLGTLHLALLKDTIINGVEWGYTSEEIKTKKLQIREQIKTYTEGAVTVFKTSLQSPLTPLKMSDYNKQTEYITGITVNCLDIIRLWPTFDPIDYPMEIDLELTRVLRKRIFGDQDITPPQQPFPVDTWKADSTTDINNTGIGVPIYGNKNLSGIAIHQNSSSEFAGPDGIAYSYTDGTTVSYGKTDPNQSLTPIEIDNPLVGVGFRYPWPRTYIDLLYFKNNPYYGQLLSGHKVHAVYPAFLPGDPIPTHAVGASFIPLELFPQNIIGMSDDDGSLTAKGFPFEKTSFPFISSRVRLEWINGANPVFMDGDGSKLVMDITNVTATKYKIRFRVATNSDNQSLTISINNLLNPTTISLPNTNNMVNPNEFQVDPDTVHAVGPRGENGNQYVLVDGPELQIPSGTIETRIQVTGPTYLDRIEFIPTGNFSTNLNDLDLTEDNHVYEIWKNDNFYSGYISGNMQLTQFGGTPNMSVTFEYFDGKTSLGTLPQLYSNFLDAISIKDITKWTGKKFNRVTATVSNLDVSHQGKISLTNLSVNDLTNTSSQFTTPEDLKKITNQVNQLFTSSSQTVLAKTVSDYKIDQMVMKVDALSDDVFGIEKKALRKLVNQAKQLSKAQNVLVGGNFERGHKWSLGYKATMVADHDLFKGNHLLLPPPTMYASYAYQKIDESKLQPNTRYTVSGFIAQSEQLELVVSRYEKEVSTMLNVPYEEALPITSDESSNCCKPAACQCPSCHDDAPDSHFFSYSIDVGSLQPEANLGIEFGLRIAKPDGFAKISNLEIKEDRPLTDQEIKKVQRKEQKWKKAFDKEQVEVKATLQPALNQINALYQNEDWNGSIHPHVTYQHLSDVVVPALPKQKHWFMDGRKGEHYGVTQQFQQALDRAFQQIEEQNLIHNGSFTNELTDWTVTGDARITIEDEHPILRISHWDTSVSQTIEIMDFEEETEYKLRVRAKGKGTVTVQHGEEELETMTFNTTSFTTQEQTFYFEGDTVDVHVQSENNTFLVDSVELIEVVEE

SEQ ID NO: 258 - protein, 644 aa, Artificial Sequence
  source: /note="Description of Artificial Sequence: Synthetic polypeptide"
MANLSELYPIPYNTVSSEYFYQNQLDVDPNGKDRPLTKNEQLVENFKKSLKDNVKVGDLLSTGADIYKDIYNAIDKGEVDYFSLTTHILGLVSIFVPELGFLAPALGVFYRALGAGNAAPEPTMEDIFKALKPKIEEMIKQELTDDQNDFLDKEVIGLQDNLGRYRDAIRTFKAADPKNNDQVKAALRNEILTIDNLFINRTPQFLKSKYAEISLPYFAMLGTLHLALLKDTIINGVEWGYTSEEIKTKKLQIREQIKTYTEGAVTVFKTSLQSPLTPLKMSDYNKQTEYITGITVNCLDIIRLWPTFDPIDYPMEIDLELTRVLRKRIFGDQDITPPQQPFPVDTWKADSTTDINNTGIGVPIYGNKNLSGIAIHQNSSSEFAGPDGIAYSYTDGTTVSYGKTDPNQSLTPIEIDNPLVGVGFRYPWPRTYIDLLYFKNNPYYGQLLSGHKVHAVYPAFLPGDPIPTHAVGASFIPLELFPQNIIGMSDDDGSLTAKGFPFEKTSFPFISSRVRLEWINGANPVFMDGDGSKLVMDITNVTATKYKIRFRVATNSDNQSLTISINNLLNPTTISLPNTNNMVNPNEFQVDPDTVHAVGPRGENGNQYVLVDGPELQIPSGTIETRIQVTGPTYLDRIEFIPTG

SEQ ID NO: 259 - protein, 376 aa, Bacillus sp.
VMHTTQHNTTRKEDLRMKYKDRKHAKRKYKQALLATVATMTLGVSTLGSTASAFAEEKDKNATQQQNTVQQKDAGTYYEGEQKELNPLAQFDKWTQDLGKTTKAGDYKTTLGMAEKLLPTVYKDLNSGNFKNTLRSVTMLSTALIPYGGAFISPIIGLLWSENTVDKTQQMMDKINTLMDGAIKNYDLTALKQDALTLQKELKTFQDSVNGTISPSGTYYDSIQNGNVTQAKIINSLFNRLIDQSQKPGHELDELPLFVNIATAQLTFFKYMEQNAVQNDRIKMDSENFNNYFANHLQNDQTTYLTTKQLGEKYVKYVNDTYNKAETDFHKKTGGTLKTNADINFHQGLVDLKNLTAGNEAFLYVATGHRYKCYEL

SEQ ID NO: 260 - protein, 360 aa, Artificial Sequence
  source: /note="Description of Artificial Sequence: Synthetic polypeptide"
MKYKDRKHAKRKYKQALLATVATMTLGVSTLGSTASAFAEEKDKNATQQQNTVQQKDAGTYYEGEQKELNPLAQFDKWTQDLGKTTKAGDYKTTLGMAEKLLPTVYKDLNSGNFKNTLRSVTMLSTALIPYGGAFISPIIGLLWSENTVDKTQQMMDKINTLMDGAIKNYDLTALKQDALTLQKELKTFQDSVNGTISPSGTYYDSIQNGNVTQAKIINSLFNRLIDQSQKPGHELDELPLFVNIATAQLTFFKYMEQNAVQNDRIKMDSENFNNYFANHLQNDQTTYLTTKQLGEKYVKYVNDTYNKAETDFHKKTGGTLKTNADINFHQGLVDLKNLTAGNEAFLYVATGHRYKCYEL

SEQ ID NO: 261 - protein, 324 aa, Artificial Sequence
  source: /note="Description of Artificial Sequence: Synthetic polypeptide"
MFAEEKDKNATQQQNTVQQKDAGTYYEGEQKELNPLAQFDKWTQDLGKTTKAGDYKTTLGMAEKLLPTVYKDLNSGNFKNTLRSVTMLSTALIPYGGAFISPIIGLLWSENTVDKTQQMMDKINTLMDGAIKNYDLTALKQDALTLQKELKTFQDSVNGTISPSGTYYDSIQNGNVTQAKIINSLFNRLIDQSQKPGHELDELPLFVNIATAQLTFFKYMEQNAVQNDRIKMDSENFNNYFANHLQNDQTTYLTTKQLGEKYVKYVNDTYNKAETDFHKKTGGTLKTNADINFHQGLVDLKNLTAGNEAFLYVATGHRYKCYEL

SEQ ID NO: 262 - protein, 683 aa, Bacillus sp.
LFLILQKYGGITLRSTNNLDSILPEMHPIPSRVISHPDLFSLKNVNKHLRTTCEFNDPFGNILRNYVTASAGLIAVLAGVVTPIVPPLVVAGGVVNLFLPLLWPENSTAKDQKLMCEIGVLIDQKLNDFVYEQATRQLEGLEAVIEEYRDAVKSFQAKRLPRDVGAEWVRTQFQIVHSAIINAIPTFRLIGYEVTLLPLYCKLANTHLLLLRDIAAFGGVYGFTSKILESYYADLKERIIAYTDHCVRTYDVGLELAKKRKATINKNGNNPQYPWMFFPTIEKYDYQGIEDWNLFNAYRRTMTLLVLDWIAIWPTFDLKLYPIHMGLKTALTREVYTNIVGYHTLGNAFYWPWEDKPTLTKEQIEETFIRKPHLFTWLNQIDVRKSIVNDLITGLLLQYSHTLNPHIYTTSIGTTENTISSCNTIDYPVTKVNVLFNGREKINFIGFTSNTDTFSSCGYFINKPYYSPINCGKDCESRSAHVFNLSVPDTNTKGTSPEMVPFINKIQPHRLSWMYIGKSAAANDPAIDAVGCAWTHPSVDQQNMLASEGITQIPAVMSHTLEGNANVVKGPGSTGGNLVRLGPKSKMLLTITLPSIFKEYRLRIRCANQQNGSLILSVGLNQVNIALPINHHYHHTLNYRSFQIIDVPESVRLSIKEASQYTLQFGNLSEEIIIDKIEFLPLL

SEQ ID NO: 263 - protein, 671 aa, Artificial Sequence
  source: /note="Description of Artificial Sequence: Synthetic polypeptide"
MRSTNNLDSILPEMHPIPSRVISHPDLFSLKNVNKHLRTTCEFNDPFGNILRNYVTASAGLIAVLAGVVTPIVPPLVVAGGVVNLFLPLLWPENSTAKDQKLMCEIGVLIDQKLNDFVYEQATRQLEGLEAVIEEYRDAVKSFQAKRLPRDVGAEWVRTQFQIVHSAIINAIPTFRLIGYEVTLLPLYCKLANTHLLLLRDIAAFGGVYGFTSKILESYYADLKERIIAYTDHCVRTYDVGLELAKKRKATINKNGNNPQYPWMFFPTIEKYDYQGIEDWNLFNAYRRTMTLLVLDWIAIWPTFDLKLYPIHMGLKTALTREVYTNIVGYHTLGNAFYWPWEDKPTLTKEQIEETFIRKPHLFTWLNQIDVRKSIVNDLITGLLLQYSHTLNPHIYTTSIGTTENTISSCNTIDYPVTKVNVLFNGREKINFIGFTSNTDTFSSCGYFINKPYYSPINCGKDCESRSAHVFNLSVPDTNTKGTSPEMVPFINKIQPHRLSWMYIGKSAAANDPAIDAVGCAWTHPSVDQQNMLASEGITQIPAVMSHTLEGNANVVKGPGSTGGNLVRLGPKSKMLLTITLPSIFKEYRLRIRCANQQNGSLILSVGLNQVNIALPINHHYHHTLNYRSFQIIDVPESVRLSIKEASQYTLQFGNLSEEIIIDKIEFLPLL

SEQ ID NO: 264 - protein, 367 aa, Bacillus sp.
MTNELNGKMQESNELDSGILALDPFTFYRIRTFCGKMFDVSGQSTANEARVVQYSTNNKKNQNFLIFTLDDNYSIIAAEHSGKVLDIADTGTIKGRLIQHNFTNGTNQQFLINNNGTIAVKRSGKVLDIANGSTANDVPIIEYNFGNAANQKFTFERVRNFQVPAPSTGTLPSAPDFKNDINEQLPDKTDPIITHYTNIPYIIVGDKTFDSQQKIQSSPYYKLVKIQYWEKVTQRILAPRDTYSYQKRKGISRTDQVSMTETVSMSVGADFGFMFKGFSASLSTKITKELSVTKSTSTTEMTEETYTESYTNPFNHELARAQYMLVNEFYVTRMDGTRITNNWTVRDDKQTVTRIFPKSKSLTDSNE

SEQ ID NO: 265 - protein, 359 aa, Unknown
  source: /note="Description of Unknown: Organism from environmental sample"
MFRRIFKMKKYKKVFLVAPIACMLSGGVSDLPNLGIVYAQEINGSELMKPDDVWRQGDHYSKENLADTVAMRVRHSIDATPSLRAKFKMKEGEKVDSSCQEYIEDTLLHNLQLAAEGSIDVEPHVDSYTDLGQTNLLTYNNDEGVSDQTAQTTSTTIRETESHTYSNSEGIKLGIESGCTVNFTIPFLADGGGTVKLTGSVSYDHTDSNTKTQETAITFPSQTVIAAKGGTTTYYGSVTRANFSGSFKSDAHVAGGVTLKLPIVKSHYDPDGMHMETATLSAEDIYDIFVASTIPLPPYLALDSKGKSVVMTEKTTFNIQGQGGYYTRMQVKFVPKNKTKKPSIMPYEEYVQKVKHGLL

SEQ ID NO: 266 - protein, 341 aa, Artificial Sequence
  source: /note="Description of Artificial Sequence: Synthetic polypeptide"
MIACMLSGGVSDLPNLGIVYAQEINGSELMKPDDVWRQGDHYSKENLADTVAMRVRHSIDATPSLRAKFKMKEGEKVDSSCQEYIEDTLLHNLQLAAEGSIDVEPHVDSYTDLGQTNLLTYNNDEGVSDQTAQTTSTTIRETESHTYSNSEGIKLGIESGCTVNFTIPFLADGGGTVKLTGSVSYDHTDSNTKTQETAITFPSQTVIAAKGGTTTYYGSVTRANFSGSFKSDAHVAGGVTLKLPIVKSHYDPDGMHMETATLSAEDIYDIFVASTIPLPPYLALDSKGKSVVMTEKTTFNIQGQGGYYTRMQVKFVPKNKTKKPSIMPYEEYVQKVKHGLL

SEQ ID NO: 267 - protein, 160 aa, Pseudomonas sp.
LHAHLYQLTVHCQVHKLTKPTGVISASIKGLILMAARSVDVYFENYLNYSLSLKQDSLKLDHGIWDVYPPQKIVQADSGTPGKGHWKTESDGFATGTEGSCTYAFYDAAADQICYVNVHWDDPYAGSNKYDITTDSVNAKVSYSGGDGDNASVTFKIEPR

SEQ ID NO: 268 - protein, 127 aa, Artificial Sequence
  source: /note="Description of Artificial Sequence: Synthetic polypeptide"
MAARSVDVYFENYLNYSLSLKQDSLKLDHGIWDVYPPQKIVQADSGTPGKGHWKTESDGFATGTEGSCTYAFYDAAADQICYVNVHWDDPYAGSNKYDITTDSVNAKVSYSGGDGDNASVTFKIEPR

SEQ ID NO: 269 - protein, 498 aa, Unknown
  source: /note="Description of Unknown: Organism from environmental sample"
VKHMNSDQQKDGQNNGYRYQNHSVSCNCGCQQDKYEYEQKQSKGKYNNQYTSNEQTQNDERMGYPVTNEVMRNDMYDSVKKEFRAYNMCHENKNYYSCNSRQFNTFTLPEESQRFQTITSHLSSEKRGFDALRTRVGQQLGHGLPNYCRIVTVQNQVTNDYVHDGGNRQRFLFYSTDSGQFVIANQQHGEVLAYVDTGESIVTQLYNGNSRQFFRKVNVSTDHFRLMIDNDTAIAPCGDLNNWTRMTGFAFANNDTELFYHQTDQNVSITIPSLSTPTELEPPPVLTSLSDVGPSPAQATRAVIGSALIPCIFVNDVLSLDRRIQESPYYKLEYRQYWHRLWTDEIPSGDRRQFDETTGISPNAQTAMRNMIDITIGADWGLKFGNNSTPFKGGILNGLNTLESYANTDLGDRIAIVTQQNFNAFPVRYARFVKAHEYRLTRSNGQLVTTPWVALDHRLPQTARFPLNAQSLQNYKIISSYNSYDLPVLENTDDNKKW

SEQ ID NO: 270 - protein, 498 aa, Artificial Sequence
  source: /note="Description of Artificial Sequence: Synthetic polypeptide"
MKHMNSDQQKDGQNNGYRYQNHSVSCNCGCQQDKYEYEQKQSKGKYNNQYTSNEQTQNDERMGYPVTNEVMRNDMYDSVKKEFRAYNMCHENKNYYSCNSRQFNTFTLPEESQRFQTITSHLSSEKRGFDALRTRVGQQLGHGLPNYCRIVTVQNQVTNDYVHDGGNRQRFLFYSTDSGQFVIANQQHGEVLAYVDTGESIVTQLYNGNSRQFFRKVNVSTDHFRLMIDNDTAIAPCGDLNNWTRMTGFAFANNDTELFYHQTDQNVSITIPSLSTPTELEPPPVLTSLSDVGPSPAQATRAVIGSALIPCIFVNDVLSLDRRIQESPYYKLEYRQYWHRLWTDEIPSGDRRQFDETTGISPNAQTAMRNMIDITIGADWGLKFGNNSTPFKGGILNGLNTLESYANTDLGDRIAIVTQQNFNAFPVRYARFVKAHEYRLTRSNGQLVTTPWVALDHRLPQTARFPLNAQSLQNYKIISSYNSYDLPVLENTDDNKKW

SEQ ID NO: 271 - protein, 655 aa, Unknown
  source: /note="Description of Unknown: Organism from environmental sample"
MNVINQDNPQMQNMPYNVLSDSMIFGVVKDVNTALTISLDVTGKVLTMLGVPFVGPIVSFYKTIVNLLWPRSSKEIWEELMNRVEELVDQKIAEYARNKAITELEGLRNVYVLYLEALEEWKDNPNNLQVQERVRTTFRNANSHFNSSIPQFAIKGYEVPLLTVYAQAANLHLLLLRDATLFGKEWGFTEVNINDRYKEQTRVTATYTDYCISWYKQGLERLKGSSAKEWIEYHRFRREMTLMVLDIVSLFPNYDARMYSMQTVAQLTREVYTDPIAYNTQQSGSFASPWTKYDHPFSTLEEQIIRKPHLFNILKSIEICTGKATLIFNDKAYMNFWNGHILTYSTPSDNYLYKDTYGFTDTDHKIKLEDYDIYKIDSASACLANWYHAVYGVTKVDFSMIKRDNSNKTSNIYSKPSNGARFQEYHSEDELPIQLSDRDYSHILSHITYYIHSSGDASKGTASTVRTPVYVWTHRSADYYNAIHSDKITQIPLNKANDFNAGFISVKNDPGFLGGSMIYLSFGQNSGGKRADIKLPIKTEHIKPGKTAPYRVRFRAAVAISAESRWNIRINKSTGINEMISGVNLEPTMQPGENLKYESFQYFESKVFQMQHFSNEDYLNVSISGNSTMSGPDDIYIDRIEFIPVNATYESEADL

SEQ ID NO: 272 - protein, 319 aa, Unknown
  source: /note="Description of Unknown: Organism from environmental sample"
LAIINLESSIIDLSKWLGWWDRGYTELYDYSQFLHPRLVPHDLTIPQDLKPIFTSTQVLTNNTDLEQSQTVTFSETTSTSVTSTTTDGVQVGSKVSDTLTEKVNVSFPFIGSGGAENSTTVEVSAQYNWSNSKSYTNTETKQWQVSQPVKVPSRKQVVATLIIMGGTFYVPMDIMLNIIADESISSPYGGADGPNNIAHMGTNPPGYAQYVRTNQLANANWPEKPPQFMGLDSDGSLKFKGATDTQIGTGIYATVKFDQYDLGNLRTIEKTWYAPTITDYNGKNININHIISKPQLAFINPQHERLLSEHFNSQCDSQM

SEQ ID NO: 273 - protein, 319 aa, Artificial Sequence
  source: /note="Description of Artificial Sequence: Synthetic polypeptide"
MAIINLESSIIDLSKWLGWWDRGYTELYDYSQFLHPRLVPHDLTIPQDLKPIFTSTQVLTNNTDLEQSQTVTFSETTSTSVTSTTTDGVQVGSKVSDTLTEKVNVSFPFIGSGGAENSTTVEVSAQYNWSNSKSYTNTETKQWQVSQPVKVPSRKQVVATLIIMGGTFYVPMDIMLNIIADESISSPYGGADGPNNIAHMGTNPPGYAQYVRTNQLANANWPEKPPQFMGLDSDGSLKFKGATDTQIGTGIYATVKFDQYDLGNLRTIEKTWYAPTITDYNGKNININHIISKPQLAFINPQHERLLSEHFNSQCDSQM

SEQ ID NO: 274 - protein, 370 aa, Unknown
  source: /note="Description of Unknown: Organism from environmental sample"
VKPNKNQWYDIHNKNSDLVAEVKDYSTNDGANIYQKGGHNGDSQKWIFVPLNNDNYAIVNKNSGKVVQVDKNSMSQGANILQWTWNGGNNQQWFIHDLGDGSRRFTNKNSGLVWDVESNSMNQGANILQWTWNGGNNQRWIYYAMGSFNLPSIQTYPLAPPPNYKDINDVLPDRTAMVTTNYTLAPCIAVGDPQKNDQQKVQTNPYYLYVRKQYWSKVESRVLAPGTAHGYKQTSGMTTTDQKTVTNTVSHTFGADVGLSFANRSGSKSLSAALSYQYSNELSVQESRTETELSVIEEAFTIENTNKYSVAWTKYILVSQYYVQRVDGTIVNEPWTVTDYHNTYDCYYPLEASGMVNQRLSVDTNETIID

SEQ ID NO: 275 - protein, 370 aa, Artificial Sequence
  source: /note="Description of Artificial Sequence: Synthetic polypeptide"
MKPNKNQWYDIHNKNSDLVAEVKDYSTNDGANIYQKGGHNGDSQKWIFVPLNNDNYAIVNKNSGKVVQVDKNSMSQGANILQWTWNGGNNQQWFIHDLGDGSRRFTNKNSGLVWDVESNSMNQGANILQWTWNGGNNQRWIYYAMGSFNLPSIQTYPLAPPPNYKDINDVLPDRTAMVTTNYTLAPCIAVGDPQKNDQQKVQTNPYYLYVRKQYWSKVESRVLAPGTAHGYKQTSGMTTTDQKTVTNTVSHTFGADVGLSFANRSGSKSLSAALSYQYSNELSVQESRTETELSVIEEAFTIENTNKYSVAWTKYILVSQYYVQRVDGTIVNEPWTVTDYHNTYDCYYPLEASGMVNQRLSVDTNETIID

SEQ ID NO: 276 - protein, 353 aa, Bacillus sp.
MAKRDISPRDLGGKEDSPFLLSKEEWITIQKYTGDGAYVPVNEAEMRKALALSSSDEMPDFNELYSVYTNVKSHCQNWTDNTYREVLGVANEIVNYARRAKVYYRPLLDYLPAIIDGDTEALEMFKKICERLAKEAAEFRDHAGALATMIGTFATDTANDYQSLTVVKDKYDKKYGEHSEEVKQLRASVERLREDLEKYMDEYEDYQSQSWLSLLLGPVFGFALKGILDSTKGKALKARIDATKQQIEESGKIIQRNVYLMSLLDKTDTGTDKIQAQMAAALPIIQKIHGIWNSLHSDFDELSKIVMEDIHDDPEFADLGVELAIMQWEAVGKQADDFRVNADVGFVVEQYTA

SEQ ID NO: 277 - protein, 995 aa, Bacillus sp.
LFKIMLRYAFQSKFGRSKNMKLKSIFKCLTITAVLSQITVYPTSSYAVSDNENKKTIAEKKGVQGLVGYSFKDAQFKELAFISLGEQSKLIDKAKLNNNNQNIQSVRWMGRVKPSQTGEYTISTSSDKNIILQINGETIIKQGKMEKPLKLEKDKVYELKIEYRNIQDLSSDLQLFWSVDGKEKEQIPQKNILSPNFPEKESLLDDKKDLLLLPNFNLFDDKSISSELKDTDKDGIPDEWEEQGYTFKNQQIVKWDDSYLEQGYKKYVSNPYKSRTVADPYTDFQKVSGYMPAATKDEARDPLVAAYPAVGVGMEKLLFSKNENVTEGGSGTKSTSVTDTNTNTNSVEIGSTVEASLNPFALAKFTATAKYGHTWTNSTAIQNSESQSWSKQIGINPAESAYLNANVRYYNAGTAPIYDLRPTSNFVFENSGASIATITAGSNQIGNSLGPGDTYPKRNQAPISLDKANEAGTVKIAINADQLDALQDRSEVLNLETTQNKGQYATLDDTGLPVTDPSKQWDPIRTNIDSVSGSLTLNLSTSKESLERRIAAKNENDPEDKTPEITIGEAIKKAFNAKEKNGTLYYTNQDGKEISIGESAIYLITDEKTKKEIEEQLDQMLDKKLYSVKWKRGMNITLHTPEINYDFEKSEDTGWYNTYQENGGYTGKKRGRINPGISGYAKAELKLKPYTTYTSRAYVKSATSSGKNNVVFYVDSTENGDGKGVRHKVDIEGDKWQLIEVSFYTGSHPEDFKKLGLKNNGNIALHIDDVSISEWKKGVNLNNAIAREHKVDRWVTGGGVGSIFPYHYVQKVYFNKIPNTDVKYEIEWLGKPKGVVEGHEDGNKRYVDITGLSVGGDGYNNTERTVIYAISKKDPGIKVQVAEWDGPSWKHDFVWDVVNWNGTEYHNGIKFSKVPNLNLQYQLLIHERPSNNKRLTEVKPAYKNGHLNFLEFNEGQGISLDNDIEIFAVDPNNHDLKVLIGSYGKYTGGYFYPFK

SEQ ID NO: 278 - protein, 976 aa, Artificial Sequence
  source: /note="Description of Artificial Sequence: Synthetic polypeptide"
MKLKSIFKCLTITAVLSQITVYPTSSYAVSDNENKKTIAEKKGVQGLVGYSFKDAQFKELAFISLGEQSKLIDKAKLNNNNQNIQSVRWMGRVKPSQTGEYTISTSSDKNIILQINGETIIKQGKMEKPLKLEKDKVYELKIEYRNIQDLSSDLQLFWSVDGKEKEQIPQKNILSPNFPEKESLLDDKKDLLLLPNFNLFDDKSISSELKDTDKDGIPDEWEEQGYTFKNQQIVKWDDSYLEQGYKKYVSNPYKSRTVADPYTDFQKVSGYMPAATKDEARDPLVAAYPAVGVGMEKLLFSKNENVTEGGSGTKSTSVTDTNTNTNSVEIGSTVEASLNPFALAKFTATAKYGHTWTNSTAIQNSESQSWSKQIGINPAESAYLNANVRYYNAGTAPIYDLRPTSNFVFENSGASIATITAGSNQIGNSLGPGDTYPKRNQAPISLDKANEAGTVKIAINADQLDALQDRSEVLNLETTQNKGQYATLDDTGLPVTDPSKQWDPIRTNIDSVSGSLTLNLSTSKESLERRIAAKNENDPEDKTPEITIGEAIKKAFNAKEKNGTLYYTNQDGKEISIGESAIYLITDEKTKKEIEEQLDQMLDKKLYSVKWKRGMNITLHTPEINYDFEKSEDTGWYNTYQENGGYTGKKRGRINPGISGYAKAELKLKPYTTYTSRAYVKSATSSGKNNVVFYVDSTENGDGKGVRHKVDIEGDKWQLIEVSFYTGSHPEDFKKLGLKNNGNIALHIDDVSISEWKKGVNLNNAIAREHKVDRWVTGGGVGSIFPYHYVQKVYFNKIPNTDVKYEIEWLGKPKGVVEGHEDGNKRYVDITGLSVGGDGYNNTERTVIYAISKKDPGIKVQVAEWDGPSWKHDFVWDVVNWNGTEYHNGIKFSKVPNLNLQYQLLIHERPSNNKRLTEVKPAYKNGHLNFLEFNEGQGISLDNDIEIFAVDPNNHDLKVLIGSYGKYTGGYFYPFK

SEQ ID NO: 279 - protein, 650 aa, Bacillus sp.
MTTIKVTVFPDSNLMMSSLLRAHLNYPHFYNCLIFVIIISPKTYHGQNILKNNCISHKYFSLYEMGVLLPIIKYVTYLLNEIKFFKNNPNRKEYLYMKYKNQLNAKRKYKQTLFVTIATMTLGGSILGNTASAFAAENLSEKQKVSSSYPKNSNAVGSDVFKVSADGSVTLINSSPFDSPTAKAITLLGGNLLNQAYLDAYNKDFTGTARSLVLGATALIPYVGSFISPIIGLLWPANVGTDMTAQTKALVALINEQIADYDIETLEQKGKTLKDLMSRFDDLLNGKPLTFGEQGTIQETLRIKASNINDKFIEVLNDCQKRSFKAEELPIYTLIATAHLLFLNMIEQNGQGSRIQMDDETYKGYVADFKRLPIEYANYIEATSQLGKQKFNKKMDDTMNAAKKQALVGIISSDESTNLENLEKTRKQCLDEAKLLQQMGDAYGAEKARQKAQKAYEYKKQYENLIQKKGNYIKNTADNEAFKLVKKSMEDLLVEVWIPNGKYMIQSVQNRSMVVGMSGNNIQLEENNGHLNNEFVIIYDPVRNSYVIETSVETGLSSYMAANIDINNIDKSGVNVYAIPSISSHEHPDILHWKLKRERGSKSVYLENLANGQVLDILNAGTEKGTNIITWPLKQPGQNLNQGFNFVPKN

SEQ ID NO: 280 - protein, 554 aa, Artificial Sequence
  source: /note="Description of Artificial Sequence: Synthetic polypeptide"
MKYKNQLNAKRKYKQTLFVTIATMTLGGSILGNTASAFAAENLSEKQKVSSSYPKNSNAVGSDVFKVSADGSVTLINSSPFDSPTAKAITLLGGNLLNQAYLDAYNKDFTGTARSLVLGATALIPYVGSFISPIIGLLWPANVGTDMTAQTKALVALINEQIADYDIETLEQKGKTLKDLMSRFDDLLNGKPLTFGEQGTIQETLRIKASNINDKFIEVLNDCQKRSFKAEELPIYTLIATAHLLFLNMIEQNGQGSRIQMDDETYKGYVADFKRLPIEYANYIEATSQLGKQKFNKKMDDTMNAAKKQALVGIISSDESTNLENLEKTRKQCLDEAKLLQQMGDAYGAEKARQKAQKAYEYKKQYENLIQKKGNYIKNTADNEAFKLVKKSMEDLLVEVWIPNGKYMIQSVQNRSMVVGMSGNNIQLEENNGHLNNEFVIIYDPVRNSYVIETSVETGLSSYMAANIDINNIDKSGVNVYAIPSISSHEHPDILHWKLKRERGSKSVYLENLANGQVLDILNAGTEKGTNIITWPLKQPGQNLNQGFNFVPKN

SEQ ID NO: 281 - protein, 516 aa, Artificial Sequence
  source: /note="Description of Artificial Sequence: Synthetic polypeptide"
MAENLSEKQKVSSSYPKNSNAVGSDVFKVSADGSVTLINSSPFDSPTAKAITLLGGNLLNQAYLDAYNKDFTGTARSLVLGATALIPYVGSFISPIIGLLWPANVGTDMTAQTKALVALINEQIADYDIETLEQKGKTLKDLMSRFDDLLNGKPLTFGEQGTIQETLRIKASNINDKFIEVLNDCQKRSFKAEELPIYTLIATAHLLFLNMIEQNGQGSRIQMDDETYKGYVADFKRLPIEYANYIEATSQLGKQKFNKKMDDTMNAAKKQALVGIISSDESTNLENLEKTRKQCLDEAKLLQQMGDAYGAEKARQKAQKAYEYKKQYENLIQKKGNYIKNTADNEAFKLVKKSMEDLLVEVWIPNGKYMIQSVQNRSMVVGMSGNNIQLEENNGHLNNEFVIIYDPVRNSYVIETSVETGLSSYMAANIDINNIDKSGVNVYAIPSISSHEHPDILHWKLKRERGSKSVYLENLANGQVLDILNAGTEKGTNIITWPLKQPGQNLNQGFNFVPKN

SEQ ID NO: 282 - protein, 347 aa, Bacillus sp.
MKKKYYKVLAIFPLACMLSTPMLAAPVSTFAAETQNEQGTKAIDRATFEQDLKYAMTSIPAIIQPNGTGKIYNPFHTTNPAIINMVFSLENFKDVTATETKDITTADDMQEATYENVTDLNQTHITPSKTITNTDSFTYSNSEGAKLGVELDHTFNANVSIPGVGGAGGSTTEKVSTEFAYNHTSSNTTSHTEQITIPSQTIVAAPHGTTHYIGKVQRVEFSGTTENTGYITGTIEAETNFRKATEYGPGTGPYDYTQNGKEKVDIYDVFKQALTNPAYRGLPNYIELDNVNKRVILKQPITSTFTGKLGFKSDAKIEFIPSDPNKPKVQMSLTDYQNPEKRAQLLK

SEQ ID NO: 283 - protein, 317 aa, Artificial Sequence
  source: /note="Description of Artificial Sequence: Synthetic polypeptide"
MAETQNEQGTKAIDRATFEQDLKYAMTSIPAIIQPNGTGKIYNPFHTTNPAIINMVFSLENFKDVTATETKDITTADDMQEATYENVTDLNQTHITPSKTITNTDSFTYSNSEGAKLGVELDHTFNANVSIPGVGGAGGSTTEKVSTEFAYNHTSSNTTSHTEQITIPSQTIVAAPHGTTHYIGKVQRVEFSGTTENTGYITGTIEAETNFRKATEYGPGTGPYDYTQNGKEKVDIYDVFKQALTNPAYRGLPNYIELDNVNKRVILKQPITSTFTGKLGFKSDAKIEFIPSDPNKPKVQMSLTDYQNPEKRAQLLK

SEQ ID NO: 284 - protein, 598 aa, Bacillus sp.
MKYKNRKDAKRKYKQALLATVATISLGMSTFGGTASVFAAENATESGTQTENKKSLEDRFIEKATKQLNLNTAGKFSATTMGELYKYANKGPTQLNDALRAITIAGTDFLPYGGMFVSQLISAIWPETNGINSQLNALREELTKLIKSEMDNEQLNFLNSEFKTLQDLQKKLDNAVNSENSQNSDENTKNQRGAWANGIEQSFERLLDHTSDDKHKVTNLPLYTKVALAHLMFLQSLNNKAIASKMNITDQSLQEFYTMNGINTLANDYVSHIMKTYYDATGTHIEKIEKINKVKEIAQFTFNPDDAENQIKDLKNRLASVTAKKDKRFDMYAQRGQSVPAHDDVYAQYKSDISILEDVIPAYEFVAKLYTTTVGDPAIKELAKGTWVQKNSKWHFVDKDGHDKIGLIYDGGKPYYLSMADDTKNLAGTTFGKGEMLTGFVKIGGKTYHFNNSGELTFVDGTYKIVYSKANKVVDFGYDGKEHPVIWDYHDGKNQQWEFEYDAEKNAYQIINKDDERVLAYNTSGASDTALVTSNDHKPEHYWILEDTEDRNVLLVNYADNKKVLDVYGEKTDGGSRLFVQDKLNNSAAQKFKLVKID

SEQ ID NO: 285 - protein, 404 aa, Unknown
  source: /note="Description of Unknown: Organism from environmental sample"
MYKEIGFYCIKERKYMYKKIKKVAPFAVLSTAILLSPAATTFAAEKTQPENLTVQAKNMDGDGGGIGGGQHSGDHGGSVGTGDTGNQDTRGSFDEAQLKKDLADRLIPAMVNKPDLFSFGASTHPTADELTNEFKVKFTGATIAGGGYTNSGTIDTDAKVENYTDGGQVELLNYRNDTNLNQTFNTPERSVKDTESFTYSNQEGVKLGVESVTKLKVTIPFVAGAEQTYKASSEFSYNHTSSNTSSHEETTTFKSQSVVCVPGYTTQYVGQVQNATFSGSFTGTVAVGGDVTYDITTMLGQQHQDTARLVDSDLKGHAIYYIFKYSGMPVPSYAHLDDANRTVLIDNVRSTYEGVGGHYSKVVVKVFPNTRSEADAITIPYTEYMQKAQDGTLEKTLEQHFKQA

SEQ ID NO: 286 - protein, 362 aa, Artificial Sequence
  source: /note="Description of Artificial Sequence: Synthetic polypeptide"
MAEKTQPENLTVQAKNMDGDGGGIGGGQHSGDHGGSVGTGDTGNQDTRGSFDEAQLKKDLADRLIPAMVNKPDLFSFGASTHPTADELTNEFKVKFTGATIAGGGYTNSGTIDTDAKVENYTDGGQVELLNYRNDTNLNQTFNTPERSVKDTESFTYSNQEGVKLGVESVTKLKVTIPFVAGAEQTYKASSEFSYNHTSSNTSSHEETTTFKSQSVVCVPGYTTQYVGQVQNATFSGSFTGTVAVGGDVTYDITTMLGQQHQDTARLVDSDLKGHAIYYIFKYSGMPVPSYAHLDDANRTVLIDNVRSTYEGVGGHYSKVVVKVFPNTRSEADAITIPYTEYMQKAQDGTLEKTLEQHFKQA

SEQ ID NO: 287 - protein, 1174 aa, Bacillus sp.
MNSNDNNTYEIIDSNDSPYSPNRNNEYSRYPYPHNPNQPFQNTNYKDWLNSCQTNQLYGGTPESFADAETIAAVSAGIIVVGTMLGAFTAPIIAGVIISFGTLVPIIWKSEEEAKIIWQQFTMIGNRPFNTVTDQAIINLLTDRIRGLQSPIYEYNRLFNDWKAKRESNVARALLNTFDNIHLEFGRELQGTLSGQYKIQMLPGYAQVANWHLNLLQQASIHYDEWLKDSRKPAEIYFEENVTPSNELQTCLNTCASSNGTANSAYYKCLLKCHIKEYTNYCIKTYNDGLTMLKNQKNISWNIYNTYRREITLTVLDLVALFPNYDPDYYSRGVKPELTRIIYTNANLNKYSLTFRTLTQLEEALTLEPSLFFSRISLNFFTRNFRDYMDYEDIFAFTANQVHFEYSNNSNQRISSPIYGNYIGTDILKNISFNMNSINMIKVDRHRDYPTIIKNIKFFSNNTEISRYSTNSSLEPIYLTTDIFMIPKAESNHETYNHKLAYMKTDNYITDIKTNRERNFAFGWTYENVDYNNTIRKNIITSIPAVKAFQISSDSRIERGPGHTGGDLVRLQNSMQLQVTFASDMTQTYKIRIRYASNLNLNVTLQVANVSQRRQIVRTFIGNKNSNNLLYEDFGYHEFSEILGPPGVTTRTIILQSVANNLDQLFIDKIEFIPITQQYLETSEKEKIKTIQQRINDVFLDPQHQSLQTKTTDYEIDQLASEIETLSDEWYPQEKMMLLNEIKHAKQLSLDRNLLQNGNFEGWMGWTTINDSTIQTGNPNFKGNALHMPGARTTDINNTVFPTYVYQKIDESKLKPYTRYRVRGFIASSKNLELYITRYNQEIHTMMNVSDNVIYRNSYKQTNTILQASTRSDDSCHCETTQMSSLCQDPQAFSFFIDTGDLHINENLGIFILFKISDPDGYATLGNLEVIEDQPLTKEDNKHIRETEKIWNQTKENQQKETEQIYSQAQQAVNNLFSNNQMLRFETTMTDIIKVDSLIDTIPYVYNKWVPTEPGMNYQFYTNLKNQISQAYSFYDRRNIVKNGSFTNGLAHWQASSDAYVQQIDTTSVLVLPNWSTQVSQQIQVQPNHRYLLRVIAKKEGNGTGTIQISNCSPQIETLAFQDSDNINQNMWENDMGYLTKTMIITPDTNQVRIDIGETEGMFKISSIEFICTN

SEQ ID NO: 288 - protein, 675 aa, Artificial Sequence
  source: /note="Description of Artificial Sequence: Synthetic polypeptide"
MNSNDNNTYEIIDSNDSPYSPNRNNEYSRYPYPHNPNQPFQNTNYKDWLNSCQTNQLYGGTPESFADAETIAAVSAGIIVVGTMLGAFTAPIIAGVIISFGTLVPIIWKSEEEAKIIWQQFTMIGNRPFNTVTDQAIINLLTDRIRGLQSPIYEYNRLFNDWKAKRESNVARALLNTFDNIHLEFGRELQGTLSGQYKIQMLPGYAQVANWHLNLLQQASIHYDEWLKDSRKPAEIYFEENVTPSNELQTCLNTCASSNGTANSAYYKCLLKCHIKEYTNYCIKTYNDGLTMLKNQKNISWNIYNTYRREITLTVLDLVALFPNYDPDYYSRGVKPELTRIIYTNANLNKYSLTFRTLTQLEEALTLEPSLFFSRISLNFFTRNFRDYMDYEDIFAFTANQVHFEYSNNSNQRISSPIYGNYIGTDILKNISFNMNSINMIKVDRHRDYPTIIKNIKFFSNNTEISRYSTNSSLEPIYLTTDIFMIPKAESNHETYNHKLAYMKTDNYITDIKTNRERNFAFGWTYENVDYNNTIRKNIITSIPAVKAFQISSDSRIERGPGHTGGDLVRLQNSMQLQVTFASDMTQTYKIRIRYASNLNLNVTLQVANVSQRRQIVRTFIGNKNSNNLLYEDFGYHEFSEILGPPGVTTRTIILQSVANNLDQLFIDKIEFIPI

SEQ ID NO: 289 - protein, 185 aa, Bacillus sp.
MENNHPKHPIHEPQQAPSFPTHPSHLQQATYPNEKNHILPFSVIINLPKGFHIQKQRDPKLVYDLSYLSMSKEICKKSIEVDNCGYVDVDLHVLKIKGCLSFLLNVCIEPIHKQKMCSTDHKNDAIFLCAQDTLYVDHVLKYSVGKLPYYVINEEHVQVRKVEIQMLEGSLHTAKISGEFYFEYE

SEQ ID NO: 290 - protein, 272 aa, Bacillus sp.
MGNFLDLTRIFSTFANQWSMENQGCAGTLSYLIDDPSVQEFSVSGNFVATYDPPVEQVKTNSLSSFSFQNSSKDFKDQQILINTTTPIAESWELTSCVCPGGNAFGHVISPPITDIPGMPIGDSVALDHDEKITHSHSYTWDVNQTIQLPPRSSTKVTFQTQLKHVTQTFTVTYWMTGNIGVISMNPINGNVENYFPITQVLQWYKSDQFTLDMEMNKVTAFSTGIYTATYQTQPQLLVQTTNLDTPTIVEEYILDINTGTTTPVSTPNGCC

SEQ ID NO: 291 - protein, 297 aa, Paenibacillus sp.
MKKLLSLLLVSTMSVVLLAGMASPTVKAEEQRNNAVVSISNKIDTMLKSDPSWGNYFVKHTVEESILQGSNIEGTTVSNVETLTVGDSFLTNHTAQEQTLTSSSFEYEFLETTSTTNTTGWTFGYEYNASLSVLVATASHTFRVDYDMSTSQTKEKSITRTLIVPPQNVIVPAGKTYRVNYVFDKLKVSGRNTLLADIFGLSFYSIFWDSPESIGIALNYASDKQGLIRVEREDRPIFDKLRYGVRAEGEGRFSTEYGTRLYVTVDDVTNPSKPISVETRIVNNTTPNRWSQIKPIY

SEQ ID NO: 292 - protein, 270 aa, Artificial Sequence
  source: /note="Description of Artificial Sequence: Synthetic polypeptide"
MEEQRNNAVVSISNKIDTMLKSDPSWGNYFVKHTVEESILQGSNIEGTTVSNVETLTVGDSFLTNHTAQEQTLTSSSFEYEFLETTSTTNTTGWTFGYEYNASLSVLVATASHTFRVDYDMSTSQTKEKSITRTLIVPPQNVIVPAGKTYRVNYVFDKLKVSGRNTLLADIFGLSFYSIFWDSPESIGIALNYASDKQGLIRVEREDRPIFDKLRYGVRAEGEGRFSTEYGTRLYVTVDDVTNPSKPISVETRIVNNTTPNRWSQIKPIY

SEQ ID NO: 293 - protein, 373 aa, Bacillus sp.
MSNENNMNASMINDENLIPSEALASGKQISFPDFNFYKIRTFCGKYVDIRGGNTNETAAVQYTGNNGDNQKFLIFTLDNNYSVIAAKHSGKVLDVAKFPFPINEGFLIQYDFKNGENQKFFISNDGTIAVKQDGKVLDVRGASTQNDVAIISYDYKGAPNQKFTLEKSGSVSINPSAKGTLPPAPDFRTNDINEELPDDTPPIITHATYLPYFMVKDPYYNAQQKIKHSPYYILVRRQYWQKVTQRILAPSDTYDYTETTGVSRTDQTSMTETTEISIGADLGFMFKGFSVGLSASITKTLSVTKSTSTTESTEITQKVVYTNPFKHQIAYAKYMLINEYYVTRANGEMITSGDASYWKVPDPSRTVVRIIPR

SEQ ID NO: 294 - protein, 356 aa, Lysinibacillus sp.
LFLVWQNILKKEKISMKKRKYLVQKTLTIAAIASMGTTLALGSPSLVSANQISTSGEQGVLAENTPTSIIEQANAVGITDVKSELDKIGKHYYANEIAGTKYFSKGLPLTFKPNPESVVTELNFSITSNTLNNLNYDTTTISYVTVGELDNTKTPLEQTLTTVSYSESVQETTSTATQNGFKVGGSGDLLFGVPLLVEGLKINAEFNSSTTSTTAKSVTRTLTSPSQNIRVPSGKKYRAVAVLKQLNFWGDVSFTGEGINPMTTIKGRAIYTAPNGSYWEDHTWRKYTAQFWNELTNAQKNDLNGIEFIYYPSTGGVRVKAQGTAKFEGVMGSKLEVDILDVTNPASPMLVETRSF

SEQ ID NO: 295 - protein, 341 aa, Artificial Sequence
  source: /note="Description of Artificial Sequence: Synthetic polypeptide"
MKKRKYLVQKTLTIAAIASMGTTLALGSPSLVSANQISTSGEQGVLAENTPTSIIEQANAVGITDVKSELDKIGKHYYANEIAGTKYFSKGLPLTFKPNPESVVTELNFSITSNTLNNLNYDTTTISYVTVGELDNTKTPLEQTLTTVSYSESVQETTSTATQNGFKVGGSGDLLFGVPLLVEGLKINAEFNSSTTSTTAKSVTRTLTSPSQNIRVPSGKKYRAVAVLKQLNFWGDVSFTGEGINPMTTIKGRAIYTAPNGSYWEDHTWRKYTAQFWNELTNAQKNDLNGIEFIYYPSTGGVRVKAQGTAKFEGVMGSKLEVDILDVTNPASPMLVETRSF

SEQ ID NO: 296 - protein, 308 aa, Artificial Sequence
  source: /note="Description of Artificial Sequence: Synthetic polypeptide"
MNQISTSGEQGVLAENTPTSIIEQANAVGITDVKSELDKIGKHYYANEIAGTKYFSKGLPLTFKPNPESVVTELNFSITSNTLNNLNYDTTTISYVTVGELDNTKTPLEQTLTTVSYSESVQETTSTATQNGFKVGGSGDLLFGVPLLVEGLKINAEFNSSTTSTTAKSVTRTLTSPSQNIRVPSGKKYRAVAVLKQLNFWGDVSFTGEGINPMTTIKGRAIYTAPNGSYWEDHTWRKYTAQFWNELTNAQKNDLNGIEFIYYPSTGGVRVKAQGTAKFEGVMGSKLEVDILDVTNPASPMLVETRSF

SEQ ID NO: 297 - protein, 657 aa, Bacillus sp.
MSDSLQPKVDPKQPKIQGQYYGISEKIFQVTTDGVIKVLNDNALPKDAWFQKTISNMSGTVFKDFALAAHRNGSMSVNNFARDMVMVGTALIPYGGPILSPLIGLLWPASVSDEQNAMKKLMSQISDMVDEKIENYDTATLKREVEALQGELRTFEYGLNGDTSYFGAGTIEESNRTHAENINFKFHSIISSCRKEGFEKSELPIYTLMATAHLSFLSFIVGFGKTHPRLQIDEDTLKVYYKMDLGNAIASYQPYISKTFEAAGETFRKNVQFPLDQAKKDYGAGLMHIGNKIGADSDWAKKLTAQIEALQKKYNEFTIDYTFATGHCEAFEKALAEAKDIYTKNVGKIEDAQAITPKMGTIKITSFAPVTIKAMANSKFVTLFTKAKGTAIAALAPDSSNPLSQFELVATDIKDTYALRQDGEYVFFDQHEGKDGVSTTGSNQLGDWEKIKFIKQPGENKYAFQVSNGKYVSVESDKLQRLAASSTSVSTNEIFEVTDYGTNNNTNNNQPVANGTYQIISKLNNSSVVDFATSEQNNVLLYRNKNEDNQKWDLKYAGGQTYQIESNAHSVFVLAWNDFNNGTNVFGTENTGKPEHYWILEDAGDGYFFIKNKKNPDMFLAVDGSVADGTNIIVHSKQPNNVNDFWKSTERFKFQKA

SEQ ID NO: 298 - protein, 601 aa, Artificial Sequence
  source: /note="Description of Artificial Sequence: Synthetic polypeptide"
MSGTVFKDFALAAHRNGSMSVNNFARDMVMVGTALIPYGGPILSPLIGLLWPASVSDEQNAMKKLMSQISDMVDEKIENYDTATLKREVEALQGELRTFEYGLNGDTSYFGAGTIEESNRTHAENINFKFHSIISSCRKEGFEKSELPIYTLMATAHLSFLSFIVGFGKTHPRLQIDEDTLKVYYKMDLGNAIASYQPYISKTFEAAGETFRKNVQFPLDQAKKDYGAGLMHIGNKIGADSDWAKKLTAQIEALQKKYNEFTIDYTFATGHCEAFEKALAEAKDIYTKNVGKIEDAQAITPKMGTIKITSFAPVTIKAMANSKFVTLFTKAKGTAIAALAPDSSNPLSQFELVATDIKDTYALRQDGEYVFFDQHEGKDGVSTTGSNQLGDWEKIKFIKQPGENKYAFQVSNGKYVSVESDKLQRLAASSTSVSTNEIFEVTDYGTNNNTNNNQPVANGTYQIISKLNNSSVVDFATSEQNNVLLYRNKNEDNQKWDLKYAGGQTYQIESNAHSVFVLAWNDFNNGTNVFGTENTGKPEHYWILEDAGDGYFFIKNKKNPDMFLAVDGSVADGTNIIVHSKQPNNVNDFWKSTERFKFQKA

SEQ ID NO: 299 - protein, 450 aa, Artificial Sequence
  source: /note="Description of Artificial Sequence: Synthetic polypeptide"
MSGTVFKDFALAAHRNGSMSVNNFARDMVMVGTALIPYGGPILSPLIGLLWPASVSDEQNAMKKLMSQISDMVDEKIENYDTATLKREVEALQGELRTFEYGLNGDTSYFGAGTIEESNRTHAENINFKFHSIISSCRKEGFEKSELPIYTLMATAHLSFLSFIVGFGKTHPRLQIDEDTLKVYYKMDLGNAIASYQPYISKTFEAAGETFRKNVQFPLDQAKKDYGAGLMHIGNKIGADSDWAKKLTAQIEALQKKYNEFTIDYTFATGHCEAFEKALAEAKDIYTKNVGKIEDAQAITPKMGTIKITSFAPVTIKAMANSKFVTLFTKAKGTAIAALAPDSSNPLSQFELVATDIKDTYALRQDGEYVFFDQHEGKDGVSTTGSNQLGDWEKIKFIKQPGENKYAFQVSNGKYVSVESDKLQRLAASSTSVSTNEIFEVTDYGTNNNT

SEQ ID NO: 300 - protein, 451 aa, Bacillus sp.
MNGSGRHNNWNNDQQISNEYMNQSHSGSCGCGCQQYNNGSYPSNEYSSNNNGSYSSNGYSSNNNGSYSSNEYVGAYNVLDDLPQESKQFQMITNTSSNNISVIEAGNFPIYTPLDRNIGKCSSETRVENAVTNGGAKHQHESQYFLFYKTDNGNFVIANRDNGRVFEVVYDDIDGNTLASRNFDSRNVSQFYKKENLANNTFRLITIWNNTIFGTNEVGINNCHNNPTAWQKITAVPRNRFENNIYKFINEKDITFPNMVVNREVLPEPRQLTSLNDIGVAPDEAQRAIIGNTLIPAIVVKDGDISSRIKETPYYKLTYKQYWHRTWTVSIPAFGRKPVRDIIGMYDNTQTDMRNIIDMSIGDDFKPRFFSRLDPFKQQIYKGLNILPSQSTNNLSLTTFDYDKQNSTQNEVRYVKYNLAYEFELTRTNGTQVTTPWVVYTSIDIENSYPN

SEQ ID NO: 301 - protein, 431 aa, Artificial Sequence
  source: /note="Description of Artificial Sequence: Synthetic polypeptide"
MNQSHSGSCGCGCQQYNNGSYPSNEYSSNNNGSYSSNGYSSNNNGSYSSNEYVGAYNVLDDLPQESKQFQMITNTSSNNISVIEAGNFPIYTPLDRNIGKCSSETRVENAVTNGGAKHQHESQYFLFYKTDNGNFVIANRDNGRVFEVVYDDIDGNTLASRNFDSRNVSQFYKKENLANNTFRLITIWNNTIFGTNEVGINNCHNNPTAWQKITAVPRNRFENNIYKFINEKDITFPNMVVNREVLPEPRQLTSLNDIGVAPDEAQRAIIGNTLIPAIVVKDGDISSRIKETPYYKLTYKQYWHRTWTVSIPAFGRKPVRDIIGMYDNTQTDMRNIIDMSIGDDFKPRFFSRLDPFKQQIYKGLNILPSQSTNNLSLTTFDYDKQNSTQNEVRYVKYNLAYEFELTRTNGTQVTTPWVVYTSIDIENSYPN

SEQ ID NO: 302 - protein, 406 aa, Bacillus sp.
MADNLNEDQNENTVTNEDSLAKDKRNTDLPEESRIFAYYQPVNTNNKVWDATELKGDILHPNCKTSGFPHALFNFPYHGGLNQQFIWFQLDDGRFAIANKHNGEVITRNELLYEEVKNEAWKNHHTQLWRKESTSTTNFRLVNDSHAINVCSHATHDQVKFTFVHNDPSNNALLFKRRAIAQNNVVPNLPAKQPLPPLPELSNLDDPVPHETERAITGSSLVPCIMVSDYIPVSQRIKESPYYILIKKQFWKRLWDDRFIPGEYRDFEEITGMSKTEQEGMTQTTNISLQADFGFAFKALTLGLGASISRSIEISRSTTDTVMSQNSDIQGYKNENSFNLLWAKYALATEFILMRKDGITAGSWEAVDKKVTRSISYPPTQTLSWTKSLEDQEDNTVFEPTTIKSE

SEQ ID NO: 303 - protein, 927 aa, Bacillus sp.
MQNMVSSKVEQATVIGLVGFYFKDSEFKELMFIQVGEKSKLMNKARVNADSQQIQSIRWMGNLKPPQTGEYKISTSSDENVILQINGETVINQASIQKSLNLEENQVYEIKIEYRNTSNTSPDLELFWSMNDVQQEQIPEKYILSPNFSEKANSLTEKETQSFFPNYNLFDRQQENGEKQSVSPPVDTDKDGIPDEWEEKGYTFRNQQIVAWNDAFSAEGYRKYVSNPYKSRTAADPYTDFEKVTGHMPAATKDDARDPLVAAYPAVGVGMEKLHFSKNDNVSEGTSGTESKTVTETDSITNTVEIGGSLGFSEKGFSFSISPKYSHSWSKSTSTANMESETWSKQIGINTAERAYLNANVRYHNAGTAPIYELKPTTNFVFQKSGDSIATITSGPNQIGNSLGPGFTYPAKGQAPISLDKANETGTVKIHINAEQLDQLQDGSEILDLETTQNRGQYATLDETGHPVTDPSKQWDPIRTNIDAVSGSLTLNLGPGKESLERRVAAKNTNDPEDKTPEISLKEAIKKAFNAKEKGDRLYYTDQSGKEIFINESAINLIFDENTKREVEHQLNQMIDKKVYNVKWKRGMKITLHVPEKYYDFEEKDHGWAYMSVYNGGYTGQNRAHINNTGQGTTVEHYNLKPYTSYTVRAYMRTGSSTGNNDVTFSIDNNNGNGQGAKVSGKVQGNQWKLVEFSFNTGNNPEYFKYLVLKNNGNANLQFDDVSVTEWKTNEDIQRKHVFEKWNGTGSLDSVTFSRVPKTKVRYQWRVNGTFQNIIQSPPTGNDGKRTVSLNPNKVSPDNTIELYAVDEKNDNLKVKVAEFQSLSTGHQVGSWNVVTHNGSKYVNDMTFNKVPDREIRYEVTRRFMIGGEVSLGIRNANPVSGDGKRKVNFIDYNSGYGIPILYEIKVYAVDKNNATLKYLVAQSNRG

SEQ ID NO: 304 - protein, 340 aa, Unknown
  source: /note="Description of Unknown: Organism from environmental sample"
MKNISNNRGIRMRNENKILGRKFLSLATVATIGISFAIVPNTASAVKSDEIPKKLINAKLLNEPIGIQKYEDLLTEVLMVYGKHVDGKRKYHFTHTPLYFDSKFHYNSVIADGSPIIKDSSSMFIGKTTLTNNTNQEQTLSTNSFTKTISHSVTTSTTHGFKTGFKSSGEISMPIGKLSTEVSLEYNFSDTNSKTKSEMYAYTATPQNIRVPANSSVEVVVMLNKVKAQGKVNLFSRISGSYDPFINHSYYPASGEKYGKAYIHQDNYGQTVRYAKNFTELPYLSVNSDDSVNIKGKGTYEAEVGTEFSVTVNPIKNQKSRSVDGGYTFKVKPQIQKLEK

SEQ ID NO: 305 - protein, 296 aa, Artificial Sequence
  source: /note="Description of Artificial Sequence: Synthetic polypeptide"
MVKSDEIPKKLINAKLLNEPIGIQKYEDLLTEVLMVYGKHVDGKRKYHFTHTPLYFDSKFHYNSVIADGSPIIKDSSSMFIGKTTLTNNTNQEQTLSTNSFTKTISHSVTTSTTHGFKTGFKSSGEISMPIGKLSTEVSLEYNFSDTNSKTKSEMYAYTATPQNIRVPANSSVEVVVMLNKVKAQGKVNLFSRISGSYDPFINHSYYPASGEKYGKAYIHQDNYGQTVRYAKNFTELPYLSVNSDDSVNIKGKGTYEAEVGTEFSVTVNPIKNQKSRSVDGGYTFKVKPQIQKLEK

SEQ ID NO: 306 - protein, 364 aa, Bacillus sp.
MKSEFSEEVRGMKNKIIKGFIITSIVTGATIPMNTLATPIVQAETQNSYVFLTENDLTNSVKQAMPSFLDKNRPYGMYVDDYINKRKIVLPSDTLDRWYTYPQMVNEIKNTFRASYTNYVGLRNIQIGNSESAISSLRKVGTPVLLHSGESELANPDSTNTRNLISAPFSKAFTSSSTVTVTNGVNLGYKIGTKVGFKIGDVGVDVNTEFSHNLNWATANATSDSTTDTYTAPAQTIAVPPRSKAIVTYTLQKQAYVGDIELKGDLTGSMILFDPYMVSAPGTPDEKKILYTNTLYNIFDKSGVQLPAGLSLDRSNQKIKFKGAAKLQADVGQKYFVEVKIVSLDNPNNITKEFTREVTPAKSH

SEQ ID NO: 307 - protein, 353 aa, Artificial Sequence
  source: /note="Description of Artificial Sequence: Synthetic polypeptide"
MKNKIIKGFIITSIVTGATIPMNTLATPIVQAETQNSYVFLTENDLTNSVKQAMPSFLDKNRPYGMYVDDYINKRKIVLPSDTLDRWYTYPQMVNEIKNTFRASYTNYVGLRNIQIGNSESAISSLRKVGTPVLLHSGESELANPDSTNTRNLISAPFSKAFTSSSTVTVTNGVNLGYKIGTKVGFKIGDVGVDVNTEFSHNLNWATANATSDSTTDTYTAPAQTIAVPPRSKAIVTYTLQKQAYVGDIELKGDLTGSMILFDPYMVSAPGTPDEKKILYTNTLYNIFDKSGVQLPAGLSLDRSNQKIKFKGAAKLQADVGQKYFVEVKIVSLDNPNNITKEFTREVTPAKSH

SEQ ID NO: 308 - protein, 322 aa, Artificial Sequence
  source: /note="Description of Artificial Sequence: Synthetic polypeptide"
METQNSYVFLTENDLTNSVKQAMPSFLDKNRPYGMYVDDYINKRKIVLPSDTLDRWYTYPQMVNEIKNTFRASYTNYVGLRNIQIGNSESAISSLRKVGTPVLLHSGESELANPDSTNTRNLISAPFSKAFTSSSTVTVTNGVNLGYKIGTKVGFKIGDVGVDVNTEFSHNLNWATANATSDSTTDTYTAPAQTIAVPPRSKAIVTYTLQKQAYVGDIELKGDLTGSMILFDPYMVSAPGTPDEKKILYTNTLYNIFDKSGVQLPAGLSLDRSNQKIKFKGAAKLQADVGQKYFVEVKIVSLDNPNNITKEFTREVTPAKSH

SEQ ID NO: 309 - protein, 443 aa, Bacillus sp.
MAQATATQTSNVGAQTSKEEKEKSFVKEFVINYDKKTGKKLVANSVADILKAAGSAEGLDLNNFFRSMVMTGTDFMPFGMFVSPIIGLLWQENKGDALQKLEDKLKRYVLDEIDKDQLNYLQGEFNSLNEDLKTLESAVNEKDSQHADDKTKNQLGSWTVGIEQTFGKILGHTSDAKHKVTNLPLYTKVAIAHIQFLQSVQQHADKMNITQDSLRQLYTKEGLNTLINSYVEHINETYDNAKDQYIEKINKVPSFTINLGNTQGQVTDLKTRKNNAQAKLDARIRVLRTNPAMVWTNDSEYNKYTAEVNQLNDAITAYEKLAKFYEGSVGDPTIQDLAQGKWVQQSNGKWHYVDKDGKFVTGWVFYQGKKYFLAAEGDMVTGKKNLDSYVPIYSFLFVRLGLGSSQYPPMFWLSVHPHSLEVITTNEQMNLPRDLLVHSATVA

SEQ ID NO: 310 - protein, 313 aa, Bacillus sp.
MKLKVLATTGLALTLGLTSIGTIATPTYAAVAENPNPDIENNKSIYDSNNLLKFATFSTTGFEKTSEQKTLKAIDYVINDNSANPDASTRKAPTKTHSTTDSLTINASAEISVGAEMSASASIPGIASVTSKITTGLKVSTGVNKFSSETKTLSYGGDDIVAKPYQTVRVDYYLEELKTSGIMNTGTKVTEIGDNLQIWYIGVLDEPDYIQQYEPGHLTGEAVYNEFKRMEEKNKKAPMRIGQKNTGEYWLEIPKGKISDYFFIDDVAKTVSTVGAQVKFDGIAGTGLTWTTSVINPATQQKTPIAEGQVQQP

SEQ ID NO: 311 - protein, 283 aa, Artificial Sequence
  source: /note="Description of Artificial Sequence: Synthetic polypeptide"
MAENPNPDIENNKSIYDSNNLLKFATFSTTGFEKTSEQKTLKAIDYVINDNSANPDASTRKAPTKTHSTTDSLTINASAEISVGAEMSASASIPGIASVTSKITTGLKVSTGVNKFSSETKTLSYGGDDIVAKPYQTVRVDYYLEELKTSGIMNTGTKVTEIGDNLQIWYIGVLDEPDYIQQYEPGHLTGEAVYNEFKRMEEKNKKAPMRIGQKNTGEYWLEIPKGKISDYFFIDDVAKTVSTVGAQVKFDGIAGTGLTWTTSVINPATQQKTPIAEGQVQQP

SEQ ID NO: 312 - protein, 310 aa, Bacillus sp.
MKLKVLATTGLALTLGLTSIGTNVTPTYAAVQAVNPNPDIENNKDWYSSQNMLKFAPFSTTGFKITSQDKVLKSINYAENDNSGNSSPATLKSAEKSFATTDSLTVNASTELSVANEVSASGGLPGIASVTAKFTAGFKFSAGFSKVTSETRSLKYGGDPLVAEPNQLVRVDYFLEEMNTTGFMNTGTRITEIGDKLMIRGGGIDYQPGNVSGEGVYNAFKRIEELNNNGNISINMKRPDRGFDDFLLTIPKGELSNYFFIDDVAKTVSTVKEQASFTGVSGTGLKMKTSTINSQTNEKTTSAEQTIPQS

SEQ ID NO: 313 - protein, 282 aa, Artificial Sequence
  source: /note="Description of Artificial Sequence: Synthetic polypeptide"
MAVQAVNPNPDIENNKDWYSSQNMLKFAPFSTTGFKITSQDKVLKSINYAENDNSGNSSPATLKSAEKSFATTDSLTVNASTELSVANEVSASGGLPGIASVTAKFTAGFKFSAGFSKVTSETRSLKYGGDPLVAEPNQLVRVDYFLEEMNTTGFMNTGTRITEIGDKLMIRGGGIDYQPGNVSGEGVYNAFKRIEELNNNGNISINMKRPDRGFDDFLLTIPKGELSNYFFIDDVAKTVSTVKEQASFTGVSGTGLKMKTSTINSQTNEKTTSAEQTIPQS

SEQ ID NO: 314 - protein, 271 aa, Bacillus sp.
MSILNINSAVRQYISKYNYMPQTNGTYTLNLDGITIDYKAITPVSYIITEQGIDIIKTDSVTNTSQIPITREFNYSETVVDRTSAKTTEGITKGSQTTLTAGLSMIFQGITPSFSISKQMTTQYSLNTETAIETSISKTWSEKYTLTVPANTKATLVYTIKKGPFHLTLDVDAIIRGRFRATGTYRPDGFNPTITEQYEAPIAYALQGLPNIQVDDPSNAQVATLKGKVEIVGELGIDSSLVLNSQTLSGSLPPTSTVVSQKSGPDTILFG

SEQ ID NO: 315 - protein, 904 aa, Bacillus sp.
MKPYAVLSTKGLNEQYEELAQFLEDYGIAGNAVDLVKKFIEGEYSVEDISDYIFNVTTGLLGLAISEIPVIGPFISTIFTGLFSLFSGGNKENLWEKIELYVNEVVEEKILEHESELVKKELEGIQRIILDFYENLIRYNSNDDNSRVTPEEDLFSQFITTHKIILDRLPQFQKETYQVHCLPLYTQVANLDIVLLHDIVKNSDRFNLDKKVKENYMKQLSQKIREYQTYVVKVYKKGLEEIKKKNPMDFRTKYYSPIMREYEIKETLKWQIINNYERGMQLSALNIAQSWRYMDLEKFPEGVKVTRKKEIYSDLIGVPYPWGKSSYESIENKLINESFECQGDFLHISLKSYNRIDSVSCLFINKNGDRKILRKGGNGGIESNPIPFDLSNMIVEAKGSTGLTPYSMVLVREDHTKTSEFGSSLNENEHPYGFKFGGYHLASINGFGWNKDGRFDSLDALVYVFKPNHLLNNVKTNIIEIPVQDYYEKNSSSVEKEIILTNNILKLSKGEYIIFNIAGNSLKDGSDLFITYSAENASSISISTTNTTTDPISLKLPKTNKQDSIVGMTGEYIQTYMSNLNLAENDKIKIKVDSGKIKLSSIIVKNFSEILKGTNKKCQIVTALNKSSVVDLAVSDKSVILYSSHYGNNQRWEFVYDSKKQAYQIKSLWGKDYVLTCKHHSEFEPVFAEINEYKDGQYWIINELKDGYCSIHSMKNPSLVLDVRDAMTTNNTTIQLHSLHGPNSHPINLNAQKFLLIEEEKSLNGTFQIAPVKNDSRVIDLAVSDKSVILYSNHHGNNQRWEFVYDSKKQAYQIKSLWDKDYVLTCKHHVDMAPIFAEINEYKDEQYWILVNFRENGYVIRNKKYPKLELDIAFTSTSQGEKFDSIVVNSNTTSNSQHFKLMKD

SEQ ID NO: 316 - protein, 368 aa, Lactococcus sp.
VYQMRKKLIIACLASSIILLGATNTKIFASTNEQKLTHSNQINRVSLFNNSKEDLSLKSTTNVTERLEEELKNLSYNLNWNLYKIGEIDFGGILVPIIPGAASKSDRSIPESFAEIPWDNGSYDPWDFEDIPFARVNSDITLKDGETLAAHSADLENGSALEQPMGTPSFTYTQTDSISTSTTHATGVSMTTSAEMKFPFVSGSMSMTAKYDFNTTNTVESTVTKQWQVPSQNIKVPAGHRYKVSWILNTGVATGTTDLTSHIKATIPYKKDFNTDIRSGYSIDEAIANQERLVSNLPETSFIWDASANWEKVNSGTALRKWGTSRYTAKFGTELIMKITDVTNLKTPPIVVKQIPMDITPNIISGQS

SEQ ID NO: 317 - protein, 365 aa, Artificial Sequence
  source: /note="Description of Artificial Sequence: Synthetic polypeptide"
MRKKLIIACLASSIILLGATNTKIFASTNEQKLTHSNQINRVSLFNNSKEDLSLKSTTNVTERLEEELKNLSYNLNWNLYKIGEIDFGGILVPIIPGAASKSDRSIPESFAEIPWDNGSYDPWDFEDIPFARVNSDITLKDGETLAAHSADLENGSALEQPMGTPSFTYTQTDSISTSTTHATGVSMTTSAEMKFPFVSGSMSMTAKYDFNTTNTVESTVTKQWQVPSQNIKVPAGHRYKVSWILNTGVATGTTDLTSHIKATIPYKKDFNTDIRSGYSIDEAIANQERLVSNLPETSFIWDASANWEKVNSGTALRKWGTSRYTAKFGTELIMKITDVTNLKTPPIVVKQIPMDITPNIISGQS

SEQ ID NO: 318 - protein, 340 aa, Artificial Sequence
  source: /note="Description of Artificial Sequence: Synthetic polypeptide"
MSTNEQKLTHSNQINRVSLFNNSKEDLSLKSTTNVTERLEEELKNLSYNLNWNLYKIGEIDFGGILVPIIPGAASKSDRSIPESFAEIPWDNGSYDPWDFEDIPFARVNSDITLKDGETLAAHSADLENGSALEQPMGTPSFTYTQTDSISTSTTHATGVSMTTSAEMKFPFVSGSMSMTAKYDFNTTNTVESTVTKQWQVPSQNIKVPAGHRYKVSWILNTGVATGTTDLTSHIKATIPYKKDFNTDIRSGYSIDEAIANQERLVSNLPETSFIWDASANWEKVNSGTALRKWGTSRYTAKFGTELIMKITDVTNLKTPPIVVKQIPMDITPNIISGQS

SEQ ID NO: 319 - protein, 453 aa, Pedobacter sp.
MSTTLKPVPTDYERLILSGKDFFPFPPPSPKSSWESKARTVVISLAAKAPYIGGAISYVIKSFWQEAKADIWAQVSENVSRMVELAILEFEITRDGSELMAIKSDMVSYVVAKNKSEQAMQLNTLISKCTEMYFKLIKSKNKHKLIPFTVAFSLVHLAILKERVDSGEALYGEFDDAWVIDLQRQIENYQSFFNEQIPALIEWRASQIVYESITTGKLIKDTDIEINDTFGKRSFKKSYRFVDGKDYRKEELLKIKEGWMSFWMADFAQSYASFFYTNRLMPGSESVPPAIDPAFNKITIGPFSPGNENELRPLRPANESQKSGKIKEIIYNFGDSMDSFQVNFESHEGQRATKIGGDKTKTIKVDPDKELVALRFYYSQPYIGLAPLKSINFVYSDGTESETAMLKEKQVLKYQEIKIPANYEITNLRSARDATERFSYWFWLELTFKPYYP

SEQ ID NO: 320 - protein, 349 aa, Bacillus sp.
LFLRPHTIYTYVYKLNNFEKRGFMNQKILIATLLSMSLCIISGNTTNAQINTSPGIIPEQSSLQKLSSYQTQGSQVVNIDQVVRKAIPGYARFVNGLGETSKVGVHINDVKFLDVEEKYIDPDYPIQSKLIGKGPEKLVQSIEEYLYNDHPSAELTKSHTFQHGISNTSTITNSVTHNHKAGVKFTYKAKVSLLVKDDEFGGEVAYEYTNSKQTGTSDSKTFTKTFSSTASAKLPPNSKGKLVSSVYTTPATYEIKSRSFFTGSVQFSYVLANDPGTLRTTTVSLHELFSRTDEQTVDDIANNYHMWASAFWNPENGQPVNALLFEGKSILNIDETYRTETRLTDIKKI

SEQ ID NO: 321 - protein, 326 aa, Artificial Sequence
  source: /note="Description of Artificial Sequence: Synthetic polypeptide"
MNQKILIATLLSMSLCIISGNTTNAQINTSPGIIPEQSSLQKLSSYQTQGSQVVNIDQVVRKAIPGYARFVNGLGETSKVGVHINDVKFLDVEEKYIDPDYPIQSKLIGKGPEKLVQSIEEYLYNDHPSAELTKSHTFQHGISNTSTITNSVTHNHKAGVKFTYKAKVSLLVKDDEFGGEVAYEYTNSKQTGTSDSKTFTKTFSSTASAKLPPNSKGKLVSSVYTTPATYEIKSRSFFTGSVQFSYVLANDPGTLRTTTVSLHELFSRTDEQTVDDIANNYHMWASAFWNPENGQPVNALLFEGKSILNIDETYRTETRLTDIKKI

SEQ ID NO: 322 - protein, 302 aa, Artificial Sequence
  source: /note="Description of Artificial Sequence: Synthetic polypeptide"
MQINTSPGIIPEQSSLQKLSSYQTQGSQVVNIDQVVRKAIPGYARFVNGLGETSKVGVHINDVKFLDVEEKYIDPDYPIQSKLIGKGPEKLVQSIEEYLYNDHPSAELTKSHTFQHGISNTSTITNSVTHNHKAGVKFTYKAKVSLLVKDDEFGGEVAYEYTNSKQTGTSDSKTFTKTFSSTASAKLPPNSKGKLVSSVYTTPATYEIKSRSFFTGSVQFSYVLANDPGTLRTTTVSLHELFSRTDEQTVDDIANNYHMWASAFWNPENGQPVNALLFEGKSILNIDETYRTETRLTDIKKI

SEQ ID NO: 323 - protein, 953 aa, Bacillus sp.
MKNKKKYMKPLAVGLLATNIIGFGTQTVAFAATDKEPAKEQAQKNDALKKAKGSMISFAANDNTEELSDLGRALEEALKENNGVFDDTIAKKTEEKAASMHIEFDYLEFLKAVSVHTMSTLGEVAAPATGDIPVLALIGAPLVDALFPQRDKVDEMWDALKPRIEALIDEKLDERLTKDKLNELKTKLEGSAKRLQALMTRIKTLTGHGDAAVAKANEGEPKPAIVSAFDDALGAIDESITAFTQEGYETASLPLYVQMANLHLGILKDAIVHGKDLGIPDKYINEYNKTLKKDIKEYTNYVYTTFNAGLEKMKNNTAHERSQGQWNKVNGYVRAMTASSLDFASLWPTMDVDSYNQPTHLQQTRQVFGDIPQWASTGNWDYNDILNVVRGDGYRGQLKELNKQAYVGDDYHDRSERTNYLKEVYWEDQYTWDTNEISWGKKKDRYGIDYLSEGIDKNPITKNSAPTFGGAGRGMSLKMAFGDDLDNTKILPGHKLMKFVPVETSGDLGSFVMSTIRTDVPLGNFVNEKEIVGIPAEKRIVNKSNFATKSEYMNGANVMVSEKAGDKLLMKIQSKSTKKYKIRYHVATNTGTSLVLSLNGNTVDKTTLPNTEGLKDKENVVTGVEGTYTLVDGPVVTLNEKSDNSLEITSGGGKIALDRVEFVPTDVDNVGLQLKTIDGVTYCVDKDGNHLTGWQTVSGIQYYFGHTGDGSGMTHEGEMATGFKTIDGVQYYFNKTGDGSGMQHEGEMATGFKTIDGSTYYFGQTGDGAGMNHEGQMATGWKTINGKTYYFGQTGDGAGMNREGEMAIGFKTIDGVQYYFGKAGDGEGSLVVGEKAIGWKTIDGVQYYFGKTGDGAGMNHEGEKAIGWKTIDGVQYYFGKTGDGAGMDYEGEKAIGWKKIDGVQYYFNRRGDGSGMTHEGEKAIGKKWIDGTEHYFNQRGDGTGYKNEGEMEY

SEQ ID NO: 324 - protein, 923 aa, Artificial Sequence
  source: /note="Description of Artificial Sequence: Synthetic polypeptide"
MATDKEPAKEQAQKNDALKKAKGSMISFAANDNTEELSDLGRALEEALKENNGVFDDTIAKKTEEKAASMHIEFDYLEFLKAVSVHTMSTLGEVAAPATGDIPVLALIGAPLVDALFPQRDKVDEMWDALKPRIEALIDEKLDERLTKDKLNELKTKLEGSAKRLQALMTRIKTLTGHGDAAVAKANEGEPKPAIVSAFDDALGAIDESITAFTQEGYETASLPLYVQMANLHLGILKDAIVHGKDLGIPDKYINEYNKTLKKDIKEYTNYVYTTFNAGLEKMKNNTAHERSQGQWNKVNGYVRAMTASSLDFASLWPTMDVDSYNQPTHLQQTRQVFGDIPQWASTGNWDYNDILNVVRGDGYRGQLKELNKQAYVGDDYHDRSERTNYLKEVYWEDQYTWDTNEISWGKKKDRYGIDYLSEGIDKNPITKNSAPTFGGAGRGMSLKMAFGDDLDNTKILPGHKLMKFVPVETSGDLGSFVMSTIRTDVPLGNFVNEKEIVGIPAEKRIVNKSNFATKSEYMNGANVMVSEKAGDKLLMKIQSKSTKKYKIRYHVATNTGTSLVLSLNGNTVDKTTLPNTEGLKDKENVVTGVEGTYTLVDGPVVTLNEKSDNSLEITSGGGKIALDRVEFVPTDVDNVGLQLKTIDGVTYCVDKDGNHLTGWQTVSGIQYYFGHTGDGSGMTHEGEMATGFKTIDGVQYYFNKTGDGSGMQHEGEMATGFKTIDGSTYYFGQTGDGAGMNHEGQMATGWKTINGKTYYFGQTGDGAGMNREGEMAIGFKTIDGVQYYFGKAGDGEGSLVVGEKAIGWKTIDGVQYYFGKTGDGAGMNHEGEKAIGWKTIDGVQYYFGKTGDGAGMDYEGEKAIGWKKIDGVQYYFNRRGDGSGMTHEGEKAIGKKWIDGTEHYFNQRGDGTGYKNEGEMEY

SEQ ID NO: 325 - protein, 636 aa, Artificial Sequence
  source: /note="Description of Artificial Sequence: Synthetic polypeptide"
MATDKEPAKEQAQKNDALKKAKGSMISFAANDNTEELSDLGRALEEALKENNGVFDDTIAKKTEEKAASMHIEFDYLEFLKAVSVHTMSTLGEVAAPATGDIPVLALIGAPLVDALFPQRDKVDEMWDALKPRIEALIDEKLDERLTKDKLNELKTKLEGSAKRLQALMTRIKTLTGHGDAAVAKANEGEPKPAIVSAFDDALGAIDESITAFTQEGYETASLPLYVQMANLHLGILKDAIVHGKDLGIPDKYINEYNKTLKKDIKEYTNYVYTTFNAGLEKMKNNTAHERSQGQWNKVNGYVRAMTASSLDFASLWPTMDVDSYNQPTHLQQTRQVFGDIPQWASTGNWDYNDILNVVRGDGYRGQLKELNKQAYVGDDYHDRSERTNYLKEVYWEDQYTWDTNEISWGKKKDRYGIDYLSEGIDKNPITKNSAPTFGGAGRGMSLKMAFGDDLDNTKILPGHKLMKFVPVETSGDLGSFVMSTIRTDVPLGNFVNEKEIVGIPAEKRIVNKSNFATKSEYMNGANVMVSEKAGDKLLMKIQSKSTKKYKIRYHVATNTGTSLVLSLNGNTVDKTTLPNTEGLKDKENVVTGVEGTYTLVDGPVVTLNEKSDNSLEITSGGGKIALDRVEFVPTD

SEQ ID NO: 326 - protein, 1276 aa, Unknown
  source: /note="Description of Unknown: Organism from environmental sample"
MTQIYNDNKFGIQASGDMYYQARYPLAKAPGFNPQQMHYKDWMDMCINRESGELFSSARDGVIAGTAIVSFLLSVPFPIAAAVTGIVSVLMPFLWPVQAGSPGTTEAQFTWDMLMNAVESLVDQKISDLVRSEAINTLAKLQSSVRDYQQAICNLKNSSPDDPGYEKYKEDVRREFNDAEDQAKEAIIDLKTRGYEILLLASYAQAANFHLLLLRDVVQYGESWGFSTLEVEQYYSNTSSIGNPGMLQLLTIYTEHCVQWYGTGVNQLKKKFESDFTPAGWNKINDFRRDMTIMVLDLVALWPTYDPKVYAIPTKSQLTRKVYTPISGNLLKSFADRDNAVLAPTSLFTLLREVQFFRRNESSSNMIFMQYSGYKMLYQKTLDGKLQETKLFGEFGPVVNKVEIGKNSDLDVYKMNNIILGPNASRSFQAPQTFSFYFTPSERIETVGTNYAAINNEPTSTVNRGLPCNSNDNEPCESCASSCEAITINTSIPCDSSSLYSHRLASIGSVFGANPSSMIEISYGWTHVSADINNKLDSKKITQIPAVKATILTGNATVIKGPGSTGGDLVSIPPNTSFSIYLTEEVKKRYELRIRYACQGTGSLYITTEDYINGRWDLSGIGSSPVTATYSGGTLKYNSFGHLPLFPVGSGIDDNTSTIWRVNFQNNGNTSIIIDKVEFIPLEESLEEYGAKQHLEKARKAVNALFTNDAKNALRLDVTDYDVDQAANKVDCMSDEVFPKEKMMLLDQVKYAKRLSQARNLLNYGDFESSDWSGENGWKTSNNVTVLSGNPVFKGRYLNMPGANPIDGTVFPTYLYQKVDESKLKPYTRYLVRGFVGNSTNLELFVTRYDKEVHDNVNIPFSPIGTWNQRVSLPERCGTGQVASYPLSNDSFQTNAYITNTAGMTALPTKGLCEEKQHFVFHIDVGEIDQRVNLGIGVGFKISSPSGMAQLDNIEIIEANPLTGEALARVKKREQKWEREMEQKCALTEKTVSVAKQAVDSLFTDAQKNRLKATTTTQNILNAEAKVKAIPYVYNPDFEDVPGMNFTIFQALQSEILTALDLYTNRNIILNGDFSTGLTYWHATDGADVQERDGNPHVLVIPNWDANVSQEVCVQPERGYVLRVTARKEGSGKGYVTLTDCTVENTETVTFTSDEMVPTPRPSIRIQRPVEPAVCDMPRYSESFGIVPGINMMNERPERYGTGSCSCGCGNTLHTLSTSYEAKEYPSSMPNRNKPSSGYITKTIEMFPETNRMRIEMGETEGTFLVESIELFCMED

SEQ ID NO: 327 - protein, 683 aa, Artificial Sequence
  source: /note="Description of Artificial Sequence: Synthetic polypeptide"
MTQIYNDNKFGIQASGDMYYQARYPLAKAPGFNPQQMHYKDWMDMCINRESGELFSSARDGVIAGTAIVSFLLSVPFPIAAAVTGIVSVLMPFLWPVQAGSPGTTEAQFTWDMLMNAVESLVDQKISDLVRSEAINTLAKLQSSVRDYQQAICNLKNSSPDDPGYEKYKEDVRREFNDAEDQAKEAIIDLKTRGYEILLLASYAQAANFHLLLLRDVVQYGESWGFSTLEVEQYYSNTSSIGNPGMLQLLTIYTEHCVQWYGTGVNQLKKKFESDFTPAGWNKINDFRRDMTIMVLDLVALWPTYDPKVYAIPTKSQLTRKVYTPISGNLLKSFADRDNAVLAPTSLFTLLREVQFFRRNESSSNMIFMQYSGYKMLYQKTLDGKLQETKLFGEFGPVVNKVEIGKNSDLDVYKMNNIILGPNASRSFQAPQTFSFYFTPSERIETVGTNYAAINNEPTSTVNRGLPCNSNDNEPCESCASSCEAITINTSIPCDSSSLYSHRLASIGSVFGANPSSMIEISYGWTHVSADINNKLDSKKITQIPAVKATILTGNATVIKGPGSTGGDLVSIPPNTSFSIYLTEEVKKRYELRIRYACQGTGSLYITTEDYINGRWDLSGIGSSPVTATYSGGTLKYNSFGHLPLFPVGSGIDDNTSTIWRVNFQNNGNTSIIIDKVEFIPLE

SEQ ID NO: 328 - protein, 303 aa, Bacillus sp.
MAIVNFNQLITDYAKSLASSNQGVSFTGQYGYIEVGDPSGAPPFTVSNVVANPDTNTYNFAPGSSVFSSSQVVQNNSDVPITKDLTLGQSLENSNSTSTTNGLTTNYSISSTSTFSIQYGVKEGNTISEALEVTFDQTFDFSTTDSNTQTEAQNWTETTSFTVPPYSQMTVVYTVLGGNYIINTSLTCELQGCIWFTLNYPGTGNVTEIVDIYYVIENAGLNGYYPPPGNGGTPFSIAEPGGVAYFGGTGEFTGIQGVQSLVTATSAPLPGYPGQTTTSTTPLTSINPDGTVTPPSSPIPIYS

SEQ ID NO: 329 - protein, 280 aa, Bacillus sp.
MEVFTMAILDIWAEVGKYATNFCRLRGLTYSGIAGSAPQYPLKLAKFEASLPDDKVLTPPESLVTLPLTYDNKSSQVQTANVSFSEEVTDSTSTTTTEGVTIGSEVSASQSFKVKFVEVGLTQTISAECTATSSQTLTSEIKKTVLLGQDIVVPPYTRAKAVMVIEKGVYDLITDIKCELSGLIYFDATNGTKFFATIYEVLKTNKTPDFTFSFNDPEDPTCHFNGSGKLKGSSGLNSYISVEEEPLPGSSGQRRQYILPGQDLTTGIIYSGNIGIPVIN

SEQ ID NO: 330 - protein, 307 aa, Bacillus sp.
MNRKGECIMALLNLNTILSNYLATILKEPYPTKPTPLLWLGPYNDYFPGRTGINHQTLSVTGRSTNVTPIPITGFRRLVKQQIFDNRQSNLPVPKTFTFQETTKNQISTIPISGFESLFIENVFMGEDTLRGGDILFSGILNYISLGIQSNFSAKTSLATSQTTTASQDYTWSDTYTMTVPGGKKVTAIYRITMGPFNAVIDVDMILKGGVIYFYVISPIDYDNIGPFPLKFTSFPQDIKKIFQSQNIQYPDITYPSGGGVQIRGQLSLTGELGLSSELSIKTESLDGSVTITSVKTTNGPNTFLFA

SEQ ID NO: 331 - protein, 299 aa, Artificial Sequence
  source: /note="Description of Artificial Sequence: Synthetic polypeptide"
MALLNLNTILSNYLATILKEPYPTKPTPLLWLGPYNDYFPGRTGINHQTLSVTGRSTNVTPIPITGFRRLVKQQIFDNRQSNLPVPKTFTFQETTKNQISTIPISGFESLFIENVFMGEDTLRGGDILFSGILNYISLGIQSNFSAKTSLATSQTTTASQDYTWSDTYTMTVPGGKKVTAIYRITMGPFNAVIDVDMILKGGVIYFYVISPIDYDNIGPFPLKFTSFPQDIKKIFQSQNIQYPDITYPSGGGVQIRGQLSLTGELGLSSELSIKTESLDGSVTITSVKTTNGPNTFLFA

SEQ ID NO: 332 - protein, 782 aa, Bacillus sp.
MSNNSKKSPKMVDVKQTNLFPIMKYPKLYSHRNLSVTSQLLHSQSFSHTNKFFRNICDMSDSGINSMRTVSTAMSGIIWAIGGFLPYGTAIAAVGGIINVVLPVLWNESTVAEQEKIMCEVGNLIDEKIDQYAFNAATAALEGLQKVCSIYNDLVLDLKDSQRKKTYHKAAEDIRIMFWNVHSSFSEAIPSFRVPDFEVVLLPTYAAAATTHLIVLQDVIKFGKIYGFEEKIIENLYITFTKLIEEYTNHCVKTYDKGLEKAKRKKANLEGNPYVGTAEYYKYQEIANWNLFNTYRRNMTLLVLDPVTTWPTLDPKIYPHTTKFMLSRKLYTDIIGVNNYNPSSSTTINEIETSYVRQPNLFTWLDQIQIYNKEFIDNKYLSGINLTYLYTGDRLKQEALLGYKNSQICSIDVSNFSIEQAKILMRTSWYGPNIYNIEFLNAQKSNICQTSSTTQGTPPIIFAAPTSNIPDSVIKNPFKDVPNHKLSWICGHNIQENTIIDYIGFEWMHPSLDFDNTVSKRKITQVPAIMAYTRERNANVIKGPGSTGGDLVELSTGGTIKINVLLPKAIQNYILRIRCANQQKGSLIIFSDNKQIDCSISENPAYTSDLAYRSFRLVEIPSDFYLESSPDTEMHHTLYIQSIDGKVIIDKIEFIPQLIVAPFDTTGLIDAIARVYKLINWIDGKPNYEKGISFSVPDTVMDFEDFQTLRYQLEIKGVFGKVSLAQSVEYNKKEKLYYVYIDFTDLTPDGDELYISLYPVNLYVVDPEKNNVKSKLQIASRA

SEQ ID NO: 333 - protein, 657 aa, Artificial Sequence
  source: /note="Description of Artificial Sequence: Synthetic polypeptide"
MSNNSKKSPKMVDVKQTNLFPIMKYPKLYSHRNLSVTSQLLHSQSFSHTNKFFRNICDMSDSGINSMRTVSTAMSGIIWAIGGFLPYGTAIAAVGGIINVVLPVLWNESTVAEQEKIMCEVGNLIDEKIDQYAFNAATAALEGLQKVCSIYNDLVLDLKDSQRKKTYHKAAEDIRIMFWNVHSSFSEAIPSFRVPDFEVVLLPTYAAAATTHLIVLQDVIKFGKIYGFEEKIIENLYITFTKLIEEYTNHCVKTYDKGLEKAKRKKANLEGNPYVGTAEYYKYQEIANWNLFNTYRRNMTLLVLDPVTTWPTLDPKIYPHTTKFMLSRKLYTDIIGVNNYNPSSSTTINEIETSYVRQPNLFTWLDQIQIYNKEFIDNKYLSGINLTYLYTGDRLKQEALLGYKNSQICSIDVSNFSIEQAKILMRTSWYGPNIYNIEFLNAQKSNICQTSSTTQGTPPIIFAAPTSNIPDSVIKNPFKDVPNHKLSWICGHNIQENTIIDYIGFEWMHPSLDFDNTVSKRKITQVPAIMAYTRERNANVIKGPGSTGGDLVELSTGGTIKINVLLPKAIQNYILRIRCANQQKGSLIIFSDNKQIDCSISENPAYTSDLAYRSFRLVEIPSDFYLESSPDTEMHHTLYIQSIDGKVIIDKIEFIPQ

SEQ ID NO: 334 - protein, 679 aa, Bacillus sp.
MNQNSNNNEIMDTGSQPRHPLAQAPVSEFQGMNTCSTGEQSSSVRQQEAVTDAALQTTSEVTQTLINAGNTAGTLGLSSWEIAGGILSSIIKILWKATANQKKWEEMIGAVEILIKKALDKQLHETAIAQLEGLQDVVNRYIKALDDLHANPTNPVLQEEVRIRWDDADTAFITAMPQFRPGATGGDSQILLLAVYAQAANLHLLLLRDAVQFGAQWGMDSATIKTNYGQLLERQNQYSNYCVNTYDSGLKQSRNLQADLSNYDQYPWTRDNQSAYSSYRDAKGEYQGTENWNLYNKFRKEMTLMALDITSFWSLYNPYNYPLPVKTELTRELFTDIRGTTWRKDNNLNTIDGIEARMVGNRNEHLFTWLKQLYIYMKYKGKDSDTTHGNLMVGLEKTVQTTLGPDQKFPVEGQNTNYDSIERPGVIITDYYWNVAETKQWFETRRLTLRVNTGILSADMGTVDFELWDRSHSGYREYIYGASHRSNSIKDHRLSWVKFDPVYQGCPFVWSNERQLSALLFGWTHNSVDPNNSIASDKITQIPAVKGYYVENGATVVRGPGSTGGNLVKLPTNQAATQLRIAVRPSSSARNRSYTIRIRYASESNADLDVGIYYQHDEWGEWNSQRFLAEKTFSGNMAYSSFGYLNTIDFNAIGEEFKIGLSCISGGPIFIDQIEFIPR

SEQ ID NO: 335 - protein, 329 aa, Unknown
  source: /note="Description of Unknown: Organism from environmental sample"
MRNENKILGRKLLSLATVATIGISFAIVPNTASAAKSDEIPKKLINAKLLNEPIGIQKYEDLLTAALMVYGKHVDGKRKYHFTHTPLYFDSKFHYNSVIADGSPIIKDSSSMFIGKTTLTNNTNQEQTLSTNSFTKTISHSVTTSTTHGFKTGFKSSGEISMPIGKLSTEVSLEYNFSDTNSKTKSEMYAYTATPQNIRVPANSSVEVVVMLNKVKAQGKVNLFSRISGSYDPFINHSYYPAPGEKYGKAYIHQANYGQTVRYAKNFTELPYLSVNSDNSVNIKGKGTYEAEVGTEFSVTVNPIKNQKSRSVDGGYTFKVKPQIQKLEK

SEQ ID NO: 336 - protein, 296 aa, Artificial Sequence
  source: /note="Description of Artificial Sequence: Synthetic polypeptide"
MAKSDEIPKKLINAKLLNEPIGIQKYEDLLTAALMVYGKHVDGKRKYHFTHTPLYFDSKFHYNSVIADGSPIIKDSSSMFIGKTTLTNNTNQEQTLSTNSFTKTISHSVTTSTTHGFKTGFKSSGEISMPIGKLSTEVSLEYNFSDTNSKTKSEMYAYTATPQNIRVPANSSVEVVVMLNKVKAQGKVNLFSRISGSYDPFINHSYYPAPGEKYGKAYIHQANYGQTVRYAKNFTELPYLSVNSDNSVNIKGKGTYEAEVGTEFSVTVNPIKNQKSRSVDGGYTFKVKPQIQKLEK

SEQ ID NO: 337 - protein, 468 aa, Bacillus sp.
MKKPNKFSVVIPVVSVLTIGSILPITSFAAETNGLPHAKTNQTHRMHSKIGADSKIHSPKKSKNKAGAGISASTDTKAGTDTSASTDIKAGTDTSASTDIKAGTDTSASTDIKAGTDTSASTDIKAGTDTGASADIKAGTDTNVNTHIKTRTDTSTNTDSVPAIDMEQFKRDLITANEYMPPEPQSDGSRKSYLPGHLTNPATIDVTPSLENFKDVTATETKDITTADETQEATYENTTDLNQTHVTPSKTITNTDSFTYSNIEGAKLGIELDHTFTANVAIPDIGGAGQSTTEKVSTEFSYSHTSSNTTIHTEEIALPSQTIVAAPHGTTHYLGKVQRVEFSGKTEGSGYLTGTIDTEQYFTYLGEEGHWNGRADDPRNVKEKLDIYDVFKKALTNQAYSGLPNYIELDNVNKRVILKQPITSTFTGKLGFKADAKIEFIPSDPNKPKVQMSLTDYQNPEKRAQLLK

SEQ ID NO: 338 - protein, 440 aa, Artificial Sequence
  source: /note="Description of Artificial Sequence: Synthetic polypeptide"
MAETNGLPHAKTNQTHRMHSKIGADSKIHSPKKSKNKAGAGISASTDTKAGTDTSASTDIKAGTDTSASTDIKAGTDTSASTDIKAGTDTSASTDIKAGTDTGASADIKAGTDTNVNTHIKTRTDTSTNTDSVPAIDMEQFKRDLITANEYMPPEPQSDGSRKSYLPGHLTNPATIDVTPSLENFKDVTATETKDITTADETQEATYENTTDLNQTHVTPSKTITNTDSFTYSNIEGAKLGIELDHTFTANVAIPDIGGAGQSTTEKVSTEFSYSHTSSNTTIHTEEIALPSQTIVAAPHGTTHYLGKVQRVEFSGKTEGSGYLTGTIDTEQYFTYLGEEGHWNGRADDPRNVKEKLDIYDVFKKALTNQAYSGLPNYIELDNVNKRVILKQPITSTFTGKLGFKADAKIEFIPSDPNKPKVQMSLTDYQNPEKRAQLLK

SEQ ID NO: 339 - protein, 443 aa, Bacillus sp.
MAQATATQTSNVGAQTSKEEKEKSFVKEFVINYDKKTGKKLVANSVADILKAAGSTEGLDLNNFFRSMVMTGTDFMPFGMFVSPIIGLLWQENKGDALQKLEDKLKRYVLDEIDKDQLNYLQGEFNSLNEDLKTLESAVNEKDSQHADDKTKNQLGSWTVGIEQTFGKILGHTSDAKHKVTNLPLYTKVAIAHIQFLQSVQQHADKMNITQDSLRQLYTKEGLNTLINSYVEHINETYDNAKDQYIEKINKVPSFTINLGNTQGQVTDLKTRKNNAQAKLDARIRVLRTNPAMVWTNDSEYNKYTAEVNQLNDAITAYEKLAKFYEGSVGDPTIQDLAQGKWVQQSNGKWHYVDKDGKFVTGWVFYQGKKYFLAAEGDMVTGKKNLDSYVPIYSFLFIRLGLGSSQYPPMFWLSVHPHSLEVITTNEQMNLPRDLLVHSATVA

SEQ ID NO: 340 - protein, 302 aa, Unknown
  source: /note="Description of Unknown: Organism from environmental sample"
MIKQMLTSLMLISSITLCLGTTKEINAAETITDINTNLNQIGEYYYKNNLAGTKMNNMYELYEKPQSISSEAKLDFDPNSYNFKLKQSVPKLIYIGDNIFSNTTNTNQSYVTTSYSKAVTNEVSTATTKGFNLNGQGLKFKLPLFVGSNTITAPFDSGTTEINTETTTETITSGAQTVNVPANKTFKVIVSLEEFTFNGTLDYKANGTNLYNDITAEGMWIDRWGTPYRKTYNFHESVGSEWNNLNSSQKASIKEIKINPSNNSMTVEGSAEVTGTLGTRMIVKTYDITDGENKLIRTQAIE

SEQ ID NO: 341 - protein, 276 aa, Artificial Sequence
  source: /note="Description of Artificial Sequence: Synthetic polypeptide"
MAETITDINTNLNQIGEYYYKNNLAGTKMNNMYELYEKPQSISSEAKLDFDPNSYNFKLKQSVPKLIYIGDNIFSNTTNTNQSYVTTSYSKAVTNEVSTATTKGFNLNGQGLKFKLPLFVGSNTITAPFDSGTTEINTETTTETITSGAQTVNVPANKTFKVIVSLEEFTFNGTLDYKANGTNLYNDITAEGMWIDRWGTPYRKTYNFHESVGSEWNNLNSSQKASIKEIKINPSNNSMTVEGSAEVTGTLGTRMIVKTYDITDGENKLIRTQAIE

SEQ ID NO: 342 - protein, 347 aa, Bacillus sp.
MTIINLEDLIRYKVGFLPFAALNWCDRDLYRYYRDNIWNPSEMHFYPFPISNKIKPDCSNETGGAELTCNEPPGTDKLVDTSGLEIRNYQLNVPPTAILENLSPFFFQIDNFKNDTSSTQTYTTLEYSEKLIETTTTKTTHGCKTGTKITAKQSFKVPYIGTTEFAAEIFAEYNFSSEVTETTTSEKHLRVPPLNVIVKPGTGVRVTASVSRGFLQAKDARLSMELAGRFAFRSGGNLHSYGDLYPWLFTYNQVCPTQFDFNFYQNGFSFIPARSTIIFNGKTNIESTFMAALFEVTMEEYDLVRNAVIKTIVKTYDLATSTLILERVQNSPLIHYGLQPKKNFFEN

SEQ ID NO: 343 - protein, 816 aa, Bacillus sp.
MRAGDFMTKKQKKILSITLATGVFTGTYIPTAYTAFAETEQKEDLKENQLKNISQNNLQIEPYGWFENPYKGVTFSQFIDAFNNNQWKPLLVNIKNKGDAGAGTISFLKGMMTTGISLLPPPASLLGSMWSVFMPTNDANGTDMWRQLETYIDEKIDSKINDYHKYLMGAEFNGAMSAIQEYQRVLQIYNDSKNSLKRVEEPGTPVIEAVRAADRKLKEFIAVIQTPEKSTDSVYQQITAPIFVQAANAHLLLQRDMILYGEEWGMDKNQWQGYKDNQKKLIQEYTNYAMKVYNDGLEKRKKEAEEINTQQPNRNTDRWNHINDYVREYTLSVLDFVALFPATNPETYSKGAMQENSRQIYSSIKGAVIPQGGTGEGTTWENIQKTLDSQEYKGDLHKLDIRSYDRIDAIQPWYSDKLNGGSNWTTPGWTGNATGGTLKPPLINSLDNPITKVKVQSSRTPNYIDFKFDSGGDNPSFGTYRSAVGYKEDVFEYPNQKLSQIHAFNRSTYPGFEGIDAVVFGFVDKNLNQSSTYLMTNMITTIPAAKYNRGMSNFQPQVESIHAKQKAMKTSTTNSYLAYGVEISKEQEYKIRYKVAANENSKISLSHKKPGGNYAKLADTTIPITGNAADTVKGEYGSYKIVEGPTIKLMKGAHDLKLENSQGKFSLDQIELEPVEQDQVIVQDNFDNQRLNWINLGGIVNGGITGNAGMIGTNGDTWTYIQDQVVPFSKYTLSIKVKLDSNDGNERQKVTIFTDNLKHERITKTVELKGKAGYQEIQLDFITSRDLANTHVGILTSNGTSNVLFDDVQVIGAKKS

SEQ ID NO: 344 - protein, 810 aa, Artificial Sequence
  source: /note="Description of Artificial Sequence: Synthetic polypeptide"
MTKKQKKILSITLATGVFTGTYIPTAYTAFAETEQKEDLKENQLKNISQNNLQIEPYGWFENPYKGVTFSQFIDAFNNNQWKPLLVNIKNKGDAGAGTISFLKGMMTTGISLLPPPASLLGSMWSVFMPTNDANGTDMWRQLETYIDEKIDSKINDYHKYLMGAEFNGAMSAIQEYQRVLQIYNDSKNSLKRVEEPGTPVIEAVRAADRKLKEFIAVIQTPEKSTDSVYQQITAPIFVQAANAHLLLQRDMILYGEEWGMDKNQWQGYKDNQKKLIQEYTNYAMKVYNDGLEKRKKEAEEINTQQPNRNTDRWNHINDYVREYTLSVLDFVALFPATNPETYSKGAMQENSRQIYSSIKGAVIPQGGTGEGTTWENIQKTLDSQEYKGDLHKLDIRSYDRIDAIQPWYSDKLNGGSNWTTPGWTGNATGGTLKPPLINSLDNPITKVKVQSSRTPNYIDFKFDSGGDNPSFGTYRSAVGYKEDVFEYPNQKLSQIHAFNRSTYPGFEGIDAVVFGFVDKNLNQSSTYLMTNMITTIPAAKYNRGMSNFQPQVESIHAKQKAMKTSTTNSYLAYGVEISKEQEYKIRYKVAANENSKISLSHKKPGGNYAKLADTTIPITGNAADTVKGEYGSYKIVEGPTIKLMKGAHDLKLENSQGKFSLDQIELEPVEQDQVIVQDNFDNQRLNWINLGGIVNGGITGNAGMIGTNGDTWTYIQDQVVPFSKYTLSIKVKLDSNDGNERQKVTIFTDNLKHERITKTVELKGKAGYQEIQLDFITSRDLANTHVGILTSNGTSNVLFDDVQVIGAKKS

SEQ ID NO: 345 - protein, 780 aa, Artificial Sequence
  source: /note="Description of Artificial Sequence: Synthetic polypeptide"
METEQKEDLKENQLKNISQNNLQIEPYGWFENPYKGVTFSQFIDAFNNNQWKPLLVNIKNKGDAGAGTISFLKGMMTTGISLLPPPASLLGSMWSVFMPTNDANGTDMWRQLETYIDEKIDSKINDYHKYLMGAEFNGAMSAIQEYQRVLQIYNDSKNSLKRVEEPGTPVIEAVRAADRKLKEFIAVIQTPEKSTDSVYQQITAPIFVQAANAHLLLQRDMILYGEEWGMDKNQWQGYKDNQKKLIQEYTNYAMKVYNDGLEKRKKEAEEINTQQPNRNTDRWNHINDYVREYTLSVLDFVALFPATNPETYSKGAMQENSRQIYSSIKGAVIPQGGTGEGTTWENIQKTLDSQEYKGDLHKLDIRSYDRIDAIQPWYSDKLNGGSNWTTPGWTGNATGGTLKPPLINSLDNPITKVKVQSSRTPNYIDFKFDSGGDNPSFGTYRSAVGYKEDVFEYPNQKLSQIHAFNRSTYPGFEGIDAVVFGFVDKNLNQSSTYLMTNMITTIPAAKYNRGMSNFQPQVESIHAKQKAMKTSTTNSYLAYGVEISKEQEYKIRYKVAANENSKISLSHKKPGGNYAKLADTTIPITGNAADTVKGEYGSYKIVEGPTIKLMKGAHDLKLENSQGKFSLDQIELEPVEQDQVIVQDNFDNQRLNWINLGGIVNGGITGNAGMIGTNGDTWTYIQDQVVPFSKYTLSIKVKLDSNDGNERQKVTIFTDNLKHERITKTVELKGKAGYQEIQLDFITSRDLANTHVGILTSNGTSNVLFDDVQVIGAKKS

SEQ ID NO: 346 - protein, 669 aa, Artificial Sequence
  source: /note="Description of Artificial Sequence: Synthetic polypeptide"
MTKKQKKILSITLATGVFTGTYIPTAYTAFAETEQKEDLKENQLKNISQNNLQIEPYGWFENPYKGVTFSQFIDAFNNNQWKPLLVNIKNKGDAGAGTISFLKGMMTTGISLLPPPASLLGSMWSVFMPTNDANGTDMWRQLETYIDEKIDSKINDYHKYLMGAEFNGAMSAIQEYQRVLQIYNDSKNSLKRVEEPGTPVIEAVRAADRKLKEFIAVIQTPEKSTDSVYQQITAPIFVQAANAHLLLQRDMILYGEEWGMDKNQWQGYKDNQKKLIQEYTNYAMKVYNDGLEKRKKEAEEINTQQPNRNTDRWNHINDYVREYTLSVLDFVALFPATNPETYSKGAMQENSRQIYSSIKGAVIPQGGTGEGTTWENIQKTLDSQEYKGDLHKLDIRSYDRIDAIQPWYSDKLNGGSNWTTPGWTGNATGGTLKPPLINSLDNPITKVKVQSSRTPNYIDFKFDSGGDNPSFGTYRSAVGYKEDVFEYPNQKLSQIHAFNRSTYPGFEGIDAVVFGFVDKNLNQSSTYLMTNMITTIPAAKYNRGMSNFQPQVESIHAKQKAMKTSTTNSYLAYGVEISKEQEYKIRYKVAANENSKISLSHKKPGGNYAKLADTTIPITGNAADTVKGEYGSYKIVEGPTIKLMKGAHDLKLENSQGKFSLDQIELEPV

SEQ ID NO: 347 - protein, 639 aa, Artificial Sequence
  source: /note="Description of Artificial Sequence: Synthetic polypeptide"
METEQKEDLKENQLKNISQNNLQIEPYGWFENPYKGVTFSQFIDAFNNNQWKPLLVNIKNKGDAGAGTISFLKGMMTTGISLLPPPASLLGSMWSVFMPTNDANGTDMWRQLETYIDEKIDSKINDYHKYLMGAEFNGAMSAIQEYQRVLQIYNDSKNSLKRVEEPGTPVIEAVRAADRKLKEFIAVIQTPEKSTDSVYQQITAPIFVQAANAHLLLQRDMILYGEEWGMDKNQWQGYKDNQKKLIQEYTNYAMKVYNDGLEKRKKEAEEINTQQPNRNTDRWNHINDYVREYTLSVLDFVALFPATNPETYSKGAMQENSRQIYSSIKGAVIPQGGTGEGTTWENIQKTLDSQEYKGDLHKLDIRSYDRIDAIQPWYSDKLNGGSNWTTPGWTGNATGGTLKPPLINSLDNPITKVKVQSSRTPNYIDFKFDSGGDNPSFGTYRSAVGYKEDVFEYPNQKLSQIHAFNRSTYPGFEGIDAVVFGFVDKNLNQSSTYLMTNMITTIPAAKYNRGMSNFQPQVESIHAKQKAMKTSTTNSYLAYGVEISKEQEYKIRYKVAANENSKISLSHKKPGGNYAKLADTTIPITGNAADTVKGEYGSYKIVEGPTIKLMKGAHDLKLENSQGKFSLDQIELEPV

SEQ ID NO: 348 - protein, 332 aa, Bacillus sp.
MLEMKQYKKLVMILPLTGMLWGGGLLIDTNTSFASSLGQQSYKDYDNFDDPYRVDLSSRILRALSARDHEAYDIDGVDKYNAKWDWQFQYIDGQINTDATVDSYTDSGEIELLNYRNDTNVNQNHQTVEKTVKTTENFTYSNAGGAKLGLDVEAKLGVTVPFIADGGLKVTAKTEFSYNHTSSNAVTKETMYKFPSQTIVCQAGYITRYVGKVQRANFSGIFSGKAAATGNLEVYVINSEGERVFKTISIYDIYKYTKNDMPLQSDVEFDEEKKRVIIPWNIESTYTGQGGHNAIVNVTVTPINNQGAARTMSLRNYLDKIKEGTLDEFMSK

SEQ ID NO: 349 - protein, 329 aa, Artificial Sequence
  source: /note="Description of Artificial Sequence: Synthetic polypeptide"
MKQYKKLVMILPLTGMLWGGGLLIDTNTSFASSLGQQSYKDYDNFDDPYRVDLSSRILRALSARDHEAYDIDGVDKYNAKWDWQFQYIDGQINTDATVDSYTDSGEIELLNYRNDTNVNQNHQTVEKTVKTTENFTYSNAGGAKLGLDVEAKLGVTVPFIADGGLKVTAKTEFSYNHTSSNAVTKETMYKFPSQTIVCQAGYITRYVGKVQRANFSGIFSGKAAATGNLEVYVINSEGERVFKTISIYDIYKYTKNDMPLQSDVEFDEEKKRVIIPWNIESTYTGQGGHNAIVNVTVTPINNQGAARTMSLRNYLDKIKEGTLDEFMSK

SEQ ID NO: 350 - protein, 300 aa, Bacillus sp.
MQKKVMLYGLLAGTLLGNVTLSTNVSAAEIEGNKNNIINTPTSKSQKAMNDINQEAIQDIDQKVNKMIDSIPPIFGSKYTRTDRYGESLTYSGINLKENNSTNVEPIYFGSNTFYNDTELEQSYNTTSFSEAVTKSNTTQTQNGFKSGVTTGGKVGIPFVAEGEVKINLEYNFTHTNSNTTSKTTTLTAPPQAVKVPTGKVYKADVYFEKKSTSGTVELYGDLLTGVVAEGRTSFIGNVLHLATDKQGLIQSPNDPNKVRAVGKGTFTVEHGSNFIVKTYDVTSGQKSAKLVDTKIIPIK

SEQ ID NO: 351 - protein, 274 aa, Artificial Sequence
  source: /note="Description of Artificial Sequence: Synthetic polypeptide"
MAEIEGNKNNIINTPTSKSQKAMNDINQEAIQDIDQKVNKMIDSIPPIFGSKYTRTDRYGESLTYSGINLKENNSTNVEPIYFGSNTFYNDTELEQSYNTTSFSEAVTKSNTTQTQNGFKSGVTTGGKVGIPFVAEGEVKINLEYNFTHTNSNTTSKTTTLTAPPQAVKVPTGKVYKADVYFEKKSTSGTVELYGDLLTGVVAEGRTSFIGNVLHLATDKQGLIQSPNDPNKVRAVGKGTFTVEHGSNFIVKTYDVTSGQKSAKLVDTKIIPIK

SEQ ID NO: 352 - protein, 359 aa, Bacillus sp.
MEIKKDTYYKMVNRNSGLVADVAGRSTSNSAYLEQYPWQGETFQQWLVFQLNGGLSAIVNRNSGLIADVAGRSTSNSAHLEQYPWQGETFQQWSFEEVDEYYKIVNQNSGLVADVTGRSTSNSTHLEQYQWQNETFQQWSLEEVEAVTLPSVITQELPDPPQYTSLNDNLPDSTTPVITAYTLMPCIMVDDNGWSAVSKINQGPYYMLTKTQYWKKIDSHTFAPSAQYTSKTTYGMSEEDQESMTQTTSISVTADAGFSFGKMSSSISGTVTNELQVSQSTTTDKMTTQENDETITNNHEYEVAWSLYALVTQYELQRANGTSVTSPWTVINKNDERESYYPLDSPPVPTSQANLKMIK

SEQ ID NO: 353 - protein, 566 aa, Bacillus sp.
VMNMLIKSYNQRGRFILMKYKDRKHAKRKYKQALLATVATMTLGVSTLGSTASVFAEENTQQQQSAMAPAIDGSGGIKTDESVFKQAEDGTITVLKEKLFNINTLKAIGSLGGATLKEAWADRNAGNFNNTFRTLAMGSAALIPYGGVVISPLIGFLWSENNHAEQAKLKQLLSDIAKQTHSQIADYDIEALTTKLSSIHDDLEQFEKIMNPTGRKIAAAPSVGDGPSQTRDLIGRIHGNLKQLVAETQKPSYKETERPIFMVAATAHLQFLNYLALYGKDPKINYDDEGLEIAVLTPLAKAKEDYKKYAMEDAKKALEAINAGAHGVIEAGNIGDNTSSSAIIKSYILGADKIVRENFDTSINEISLKRELGIKTDFTLDREGRTFYYDPQDNKMQTGWKEISTSFAARIQGQERLSIDLLKNIGLTYSWYYFSPEKTDEFEKGQMYQNTIKTINGKTYAFAADGKCINPDGDEIPGWHKVGTSWYFYSNGNAKNSDGKTFAKNEQVTGWYQADGKWYYLTPTSRTNKEGTTFGEGQLVVGTLSIKDTNGKSVEYKFNNDGSLKN

SEQ ID NO: 354 - protein, 549 aa, Artificial Sequence
  source: /note="Description of Artificial Sequence: Synthetic polypeptide"
MKYKDRKHAKRKYKQALLATVATMTLGVSTLGSTASVFAEENTQQQQSAMAPAIDGSGGIKTDESVFKQAEDGTITVLKEKLFNINTLKAIGSLGGATLKEAWADRNAGNFNNTFRTLAMGSAALIPYGGVVISPLIGFLWSENNHAEQAKLKQLLSDIAKQTHSQIADYDIEALTTKLSSIHDDLEQFEKIMNPTGRKIAAAPSVGDGPSQTRDLIGRIHGNLKQLVAETQKPSYKETERPIFMVAATAHLQFLNYLALYGKDPKINYDDEGLEIAVLTPLAKAKEDYKKYAMEDAKKALEAINAGAHGVIEAGNIGDNTSSSAIIKSYILGADKIVRENFDTSINEISLKRELGIKTDFTLDREGRTFYYDPQDNKMQTGWKEISTSFAARIQGQERLSIDLLKNIGLTYSWYYFSPEKTDEFEKGQMYQNTIKTINGKTYAFAADGKCINPDGDEIPGWHKVGTSWYFYSNGNAKNSDGKTFAKNEQVTGWYQADGKWYYLTPTSRTNKEGTTFGEGQLVVGTLSIKDTNGKSVEYKFNNDGSLKN

SEQ ID NO: 355 - protein, 511 aa, Artificial Sequence
  source: /note="Description of Artificial Sequence: Synthetic polypeptide"
MEENTQQQQSAMAPAIDGSGGIKTDESVFKQAEDGTITVLKEKLFNINTLKAIGSLGGATLKEAWADRNAGNFNNTFRTLAMGSAALIPYGGVVISPLIGFLWSENNHAEQAKLKQLLSDIAKQTHSQIADYDIEALTTKLSSIHDDLEQFEKIMNPTGRKIAAAPSVGDGPSQTRDLIGRIHGNLKQLVAETQKPSYKETERPIFMVAATAHLQFLNYLALYGKDPKINYDDEGLEIAVLTPLAKAKEDYKKYAMEDAKKALEAINAGAHGVIEAGNIGDNTSSSAIIKSYILGADKIVRENFDTSINEISLKRELGIKTDFTLDREGRTFYYDPQDNKMQTGWKEISTSFAARIQGQERLSIDLLKNIGLTYSWYYFSPEKTDEFEKGQMYQNTIKTINGKTYAFAADGKCINPDGDEIPGWHKVGTSWYFYSNGNAKNSDGKTFAKNEQVTGWYQADGKWYYLTPTSRTNKEGTTFGEGQLVVGTLSIKDTNGKSVEYKFNNDGSLKN

SEQ ID NO: 356 - protein, 589 aa, Bacillus sp.
MKYKERTQAKRKYKQALLLTVTAITLGVSTLGSTATAFAAEEDNISVISSHTLNDVGTQMSPEEKEKTFWQKASAELNVKNGKKFAGTSMKEFLNFAKSGSSESANNALRAMLLASFDFVPYGMFITPIVGYIWPEQGGIKEQLEKLKDEIKEDTKKQIAEQHLTNLNTEFSNLVENIVHLENSVNGKNNSTYYSAGSIQETRRIWAAQIEFHFGKILKLAKEEAHKVDDLPLYTQVAAAHIIFLKNLEKNGIGPKYQFDSQSLKDFYGTAHIQKTIAEYEKYIADTYEQANRENMEKIEKLKVFDSGVLYQNFYDPNTSATIKQKLNELKTKAQAKVNDINKEMVLLGGWAAHNRALNEAQDALNNVTNALAAANFLSNLIDTTVNDPAFNQAASLGTWIEEKDGKTGKEIKNHYYYKNRSGDLVTEWLNIGRSVYYFSPEENFENSSGEKFKRGELVIGWINTQDEDNTIRAYFLSRQDGDQNSDGELFNRGQMVTGMADITYENGDKESYYFSPEDGLKNSDGELFNRGQMMTKWVEIKNTKTGEKHWYYFNPDDGSMIVKKKAVQIGGKKYDFDSNGVCTTPNGY

SEQ ID NO: 357 - protein, 551 aa, Artificial Sequence
  source: /note="Description of Artificial Sequence: Synthetic polypeptide"
MAEEDNISVISSHTLNDVGTQMSPEEKEKTFWQKASAELNVKNGKKFAGTSMKEFLNFAKSGSSESANNALRAMLLASFDFVPYGMFITPIVGYIWPEQGGIKEQLEKLKDEIKEDTKKQIAEQHLTNLNTEFSNLVENIVHLENSVNGKNNSTYYSAGSIQETRRIWAAQIEFHFGKILKLAKEEAHKVDDLPLYTQVAAAHIIFLKNLEKNGIGPKYQFDSQSLKDFYGTAHIQKTIAEYEKYIADTYEQANRENMEKIEKLKVFDSGVLYQNFYDPNTSATIKQKLNELKTKAQAKVNDINKEMVLLGGWAAHNRALNEAQDALNNVTNALAAANFLSNLIDTTVNDPAFNQAASLGTWIEEKDGKTGKEIKNHYYYKNRSGDLVTEWLNIGRSVYYFSPEENFENSSGEKFKRGELVIGWINTQDEDNTIRAYFLSRQDGDQNSDGELFNRGQMVTGMADITYENGDKESYYFSPEDGLKNSDGELFNRGQMMTKWVEIKNTKTGEKHWYYFNPDDGSMIVKKKAVQIGGKKYDFDSNGVCTTPNGY

SEQ ID NO: 358 - protein, 339 aa, Lysinibacillus sp.
MLKNNKKTKQILSLAMIGVMGTSFAFASPISASAASTPQVNPIAAGQENPYIENWDEPFKKMFSMLQNNVEQYKNYKNPQFVLKKVVNTSVEEDGSPITNAKTLFVGKTVFRNNTDRDQTFTTNEFSKTIEHSVSSSTTHGFNLGVTASASFGIPVIGETSVEISTEYNFSNTNETTKTESYTYTASPQNIVVPAHSAVEVSVILNTVKIDGNVDLTSTITGTVNYEDGSRKTNNNLQNLWYDAFKYSHIQTSAFNVKPVYNYSDGLSDKVTLKGKGKYSAEYGTQFSVSVKPIVEQPRALAVQSDGTVAENGKSTDEDYTTTNEGYTYTVEPEVKKGQ

SEQ ID NO: 359 - protein, 306 aa, Artificial Sequence
  source: /note="Description of Artificial Sequence: Synthetic polypeptide"
MASTPQVNPIAAGQENPYIENWDEPFKKMFSMLQNNVEQYKNYKNPQFVLKKVVNTSVEEDGSPITNAKTLFVGKTVFRNNTDRDQTFTTNEFSKTIEHSVSSSTTHGFNLGVTASASFGIPVIGETSVEISTEYNFSNTNETTKTESYTYTASPQNIVVPAHSAVEVSVILNTVKIDGNVDLTSTITGTVNYEDGSRKTNNNLQNLWYDAFKYSHIQTSAFNVKPVYNYSDGLSDKVTLKGKGKYSAEYGTQFSVSVKPIVEQPRALAVQSDGTVAENGKSTDEDYTTTNEGYTYTVEPEVKKGQ

SEQ ID NO: 360 - protein, 364 aa, Bacillus sp.
MKSEFSEEVRGMKNKIIKGFIITSIVTGATIPMNTLATPIVQAETQNSYVFLTENDLTSSVKQAMPSFLDKNRPYGMYVDDYINKRKIVIPSDMLDSWYTYPQMVNEIKNIFRASYTNYVGLRNIQIGNSESAISSLRQVGTPVLLHSGTSELVNLDSANTRNLVSAPFSKAFTSSSTVTVTNGVNLGYKIGTKVGFKIGDVGVDVNTEFSHNINWATANATSNSSTDTYTAPAQTIAVPPRSKAIVTYTLQKQAYVGDIELKGDLTGSMILFDPYIVSDSDTPDEKKILYTNTLYDIFDKSGVQLPAGLSLDRSNQKIKFKGAAKIQADVGQKYLVEVKIVSLDNPNNITKEFTREVTPAKSH

SEQ ID NO: 361 - protein, 353 aa, Artificial Sequence
  source: /note="Description of Artificial Sequence: Synthetic polypeptide"
MKNKIIKGFIITSIVTGATIPMNTLATPIVQAETQNSYVFLTENDLTSSVKQAMPSFLDKNRPYGMYVDDYINKRKIVIPSDMLDSWYTYPQMVNEIKNIFRASYTNYVGLRNIQIGNSESAISSLRQVGTPVLLHSGTSELVNLDSANTRNLVSAPFSKAFTSSSTVTVTNGVNLGYKIGTKVGFKIGDVGVDVNTEFSHNINWATANATSNSSTDTYTAPAQTIAVPPRSKAIVTYTLQKQAYVGDIELKGDLTGSMILFDPYIVSDSDTPDEKKILYTNTLYDIFDKSGVQLPAGLSLDRSNQKIKFKGAAKIQADVGQKYLVEVKIVSLDNPNNITKEFTREVTPAKSH

SEQ ID NO: 362 - protein, 322 aa, Artificial Sequence
  source: /note="Description of Artificial Sequence: Synthetic polypeptide"
METQNSYVFLTENDLTSSVKQAMPSFLDKNRPYGMYVDDYINKRKIVIPSDMLDSWYTYPQMVNEIKNIFRASYTNYVGLRNIQIGNSESAISSLRQVGTPVLLHSGTSELVNLDSANTRNLVSAPFSKAFTSSSTVTVTNGVNLGYKIGTKVGFKIGDVGVDVNTEFSHNINWATANATSNSSTDTYTAPAQTIAVPPRSKAIVTYTLQKQAYVGDIELKGDLTGSMILFDPYIVSDSDTPDEKKILYTNTLYDIFDKSGVQLPAGLSLDRSNQKIKFKGAAKIQADVGQKYLVEVKIVSLDNPNNITKEFTREVTPAKSH

SEQ ID NO: 363 - protein, 373 aa, Bacillus sp.
VGKSMTFKVGMKYMFKNKNSRKYLDIAGNQTGNNANVQQYEYLADAPSERFFLHPLDNNYFAMINLNSGKVIDVAGNQTGNNVNIQQFEWLGDAPSEYWYFHREADGHYVIESKLSGKVLDIAGNQTGNNANVQQYEFLSDAPSERFAVEEAGSVSLPSINTQPLPSVPEYETINDQLPEETERVVTAFTIVPSISVKDPHYGSDTAKQIKENPYYMVVKKQWWKKQESYVLAPSEKYDFVTKTGIKVTDQETATRTVSWSIGADMGFSFKGFSLGMSTQYSQELQTSISHTTEQLKEETQEHHIINPFPERMAYSRYILTTEYYVQRKNGTIVNSPWTMTDKTKAHSVTFPKSTGNVLNESTKQQSKSESVK

SEQ ID NO: 364 - protein, 369 aa, Artificial Sequence
  source: /note="Description of Artificial Sequence: Synthetic polypeptide"
MTFKVGMKYMFKNKNSRKYLDIAGNQTGNNANVQQYEYLADAPSERFFLHPLDNNYFAMINLNSGKVIDVAGNQTGNNVNIQQFEWLGDAPSEYWYFHREADGHYVIESKLSGKVLDIAGNQTGNNANVQQYEFLSDAPSERFAVEEAGSVSLPSINTQPLPSVPEYETINDQLPEETERVVTAFTIVPSISVKDPHYGSDTAKQIKENPYYMVVKKQWWKKQESYVLAPSEKYDFVTKTGIKVTDQETATRTVSWSIGADMGFSFKGFSLGMSTQYSQELQTSISHTTEQLKEETQEHHIINPFPERMAYSRYILTTEYYVQRKNGTIVNSPWTMTDKTKAHSVTFPKSTGNVLNESTKQQSKSESVK

SEQ ID NO: 365 - protein, 322 aa, Bacillus sp.
MKVTKYKKLLAVVPLACMLSAPVIAAPVNAFAAAPTNYQETSQFSKEIFKQWLDEKISPALADPVKQIYTGASRINLNGTYANLGSGDINLTADTVSDGTPKFVSVGTLHNTTDVDQVLKTDSQAITNTHSFTETNAEGVALKIGTETKVSVGIPFLAEGNVTLKMEVDTSYTHTTGNTYTKTTTDTFPSQDIKAAPHGTTEMNIAIFNQEYSGAYDGYTEVTSTIGQADYINQTSDLGVMSLYDFIKKGMAKDPSISLPSYLKLDDIKQKVFVKVPMSFSGIAGYHTKGEVTFTPDDPNKPAVRMSLEDYKNPVKRDQLLK

SEQ ID NO: 366 - protein, 291 aa, Artificial Sequence
  source: /note="Description of Artificial Sequence: Synthetic polypeptide"
MAAPTNYQETSQFSKEIFKQWLDEKISPALADPVKQIYTGASRINLNGTYANLGSGDINLTADTVSDGTPKFVSVGTLHNTTDVDQVLKTDSQAITNTHSFTETNAEGVALKIGTETKVSVGIPFLAEGNVTLKMEVDTSYTHTTGNTYTKTTTDTFPSQDIKAAPHGTTEMNIAIFNQEYSGAYDGYTEVTSTIGQADYINQTSDLGVMSLYDFIKKGMAKDPSISLPSYLKLDDIKQKVFVKVPMSFSGIAGYHTKGEVTFTPDDPNKPAVRMSLEDYKNPVKRDQLLK

SEQ ID NO: 367 - protein, 468 aa, Bacillus sp.
MKKPNKFSVVIPVVSVLTIGSILPITSFAAETNGLPHAKTNQTHRMHSKIGADSKIHSPKKSKNKAGAGISASTDTKAGTDTSASTDIKAGTDTSASTDIKAGTDTSTSTDTKAGTDTSTSTEIKAGTDTGASTDIKAGTDTNVNTHIKTRTDASTNTDSVPAIDMEQFKRDLITANEYMPPEPQSDGSRKSYLPGHLTNPATIDVTPSLENFKDVTATETKDITTADETQEATYENTTDLNQTHVTPSKTITNTDSFTYSNIEGAKLGIELDHTFTANVAIPDIGGAGQSTTEKVSTEFSYSHTSSNTTIHTEEITLPSQTIVAAPHGTTHYLGKVQRVEFSGKTEGSGYLTGTIDTEQYFTYPGEEGHWNGRADDPRNVKEKLDIYDVFKKALTNQAYSGLPNYIELDNVNKRVILKQPITSTFTGKLGFKADAKIEFIPSDPNKPKVQMSLTDYQNPEKRAQLLK

SEQ ID NO: 368 - protein, 440 aa, Artificial Sequence
  source: /note="Description of Artificial Sequence: Synthetic polypeptide"
MAETNGLPHAKTNQTHRMHSKIGADSKIHSPKKSKNKAGAGISASTDTKAGTDTSASTDIKAGTDTSASTDIKAGTDTSTSTDTKAGTDTSTSTEIKAGTDTGASTDIKAGTDTNVNTHIKTRTDASTNTDSVPAIDMEQFKRDLITANEYMPPEPQSDGSRKSYLPGHLTNPATIDVTPSLENFKDVTATETKDITTADETQEATYENTTDLNQTHVTPSKTITNTDSFTYSNIEGAKLGIELDHTFTANVAIPDIGGAGQSTTEKVSTEFSYSHTSSNTTIHTEEITLPSQTIVAAPHGTTHYLGKVQRVEFSGKTEGSGYLTGTIDTEQYFTYPGEEGHWNGRADDPRNVKEKLDIYDVFKKALTNQAYSGLPNYIELDNVNKRVILKQPITSTFTGKLGFKADAKIEFIPSDPNKPKVQMSLTDYQNPEKRAQLLK

SEQ ID NO: 369 - protein, 339 aa, Lysinibacillus sp.
MLKNNKKTKQILSLAMIGVMGTSFAFASPNSASAASTPQVNPIAAGQENPYIENWDEPFKKMFSMLQNNVAQYKNYKNPQFVLNKVVKTSVEEDGSPITNAKTLFVGKTVFRNNTDHDQTFTTNEFSKTIEHSVSNSTTHGFNLGVTASASFGIPVIGETSVEISTEYNFSNTNETTKTESYTYTASPQNIVVPAHSAVEVSVILNTVKIDGNVDLTSTITGTVNYEDGSRKRNNNLQNLWYDAFRYSNTKTSAFNVKPVYEYSDGLYDKVTLKGKGKYSAEYGTQFSVSVKPIVEQPRALAVQSDGTVAENGKSTDEDYTTTNEGYTYTVKPEVKIGQ

SEQ ID NO: 370 - protein, 306 aa, Artificial Sequence
  source: /note="Description of Artificial Sequence: Synthetic polypeptide"
MASTPQVNPIAAGQENPYIENWDEPFKKMFSMLQNNVAQYKNYKNPQFVLNKVVKTSVEEDGSPITNAKTLFVGKTVFRNNTDHDQTFTTNEFSKTIEHSVSNSTTHGFNLGVTASASFGIPVIGETSVEISTEYNFSNTNETTKTESYTYTASPQNIVVPAHSAVEVSVILNTVKIDGNVDLTSTITGTVNYEDGSRKRNNNLQNLWYDAFRYSNTKTSAFNVKPVYEYSDGLYDKVTLKGKGKYSAEYGTQFSVSVKPIVEQPRALAVQSDGTVAENGKSTDEDYTTTNEGYTYTVKPEVKIGQ

SEQ ID NO: 371 - protein, 670 aa, Bacillus sp.
LYIFSLKKTELIKLIDDKKQMEETNMRKQLDVFKPDFKFFHPDLYLQKKNNRSLMCDTSFTMGVNEVVKNSTIFAVSVIGATLSVTQPFVGAAFATTSYILPVIWPSTGADSAQNFLCAAENLINEKLAFFVNEQAQSRFNGLKNTVDLFNTSMIHYINNPNSTNYTYVISQFTATNTTFAASMPLFQVRGYEVLLLPLFTQAANLYLLFLRDAIAFFKKYRSTLSNMQKISDLNTNRLKDLISEYTDYCVKIYHEGLQMMNDPKKQANLTDRLRYPWVKWKGFFFSQPDWNAHEGIESWNLMNDYRRTYTLTVLDFLPLWDTYSQPYFSFSGVRLSLTRELYTAARGKSTFHPQTPHMRTRKEIEKAIVRPPHLVTWLEDATINLRNYKQYPLSGVDTLHYLSGYLNKVQYNTIGFPGSMSCSIYDYPILKNEMVLNDEGYVGNIKFFNQANELIKQCGNPSANNFIFIHSIPDSKEVESSFSSKFLNTLSDIRGGIPYQNEFYNDDSNGHLDYISLAWLHPSLDRFNTLLVDKVTQISAVRGNELLGEANIIKGPGSTGGDLILLGEKGGIKIPITLPNNVQQYTLRIRCAHKYEKGLLQIETDFRDTIIYIPYNPNFDESLHYNSFQLIDASKDFIIIPENKYLTLSLYNLGPEIILDKIELIPYLS

SEQ ID NO: 372 - protein, 645 aa, Artificial Sequence
  source: /note="Description of Artificial Sequence: Synthetic polypeptide"
MRKQLDVFKPDFKFFHPDLYLQKKNNRSLMCDTSFTMGVNEVVKNSTIFAVSVIGATLSVTQPFVGAAFATTSYILPVIWPSTGADSAQNFLCAAENLINEKLAFFVNEQAQSRFNGLKNTVDLFNTSMIHYINNPNSTNYTYVISQFTATNTTFAASMPLFQVRGYEVLLLPLFTQAANLYLLFLRDAIAFFKKYRSTLSNMQKISDLNTNRLKDLISEYTDYCVKIYHEGLQMMNDPKKQANLTDRLRYPWVKWKGFFFSQPDWNAHEGIESWNLMNDYRRTYTLTVLDFLPLWDTYSQPYFSFSGVRLSLTRELYTAARGKSTFHPQTPHMRTRKEIEKAIVRPPHLVTWLEDATINLRNYKQYPLSGVDTLHYLSGYLNKVQYNTIGFPGSMSCSIYDYPILKNEMVLNDEGYVGNIKFFNQANELIKQCGNPSANNFIFIHSIPDSKEVESSFSSKFLNTLSDIRGGIPYQNEFYNDDSNGHLDYISLAWLHPSLDRFNTLLVDKVTQISAVRGNELLGEANIIKGPGSTGGDLILLGEKGGIKIPITLPNNVQQYTLRIRCAHKYEKGLLQIETDFRDTIIYIPYNPNFDESLHYNSFQLIDASKDFIIIPENKYLTLSLYNLGPEIILDKIELIPYLS

SEQ ID NO: 373 - protein, 421 aa, Bacillus sp.
MKPKSEETQSPSPKWSKSEYLSYRNGYAYDANIGYENKNWMNALRGETKISQLSIPGTHGSTALHGIPGADRWIINQRMSITTQLNSGIRYLDIRARRTGTAFAMHHGRAYQKKMFGDILNEVTVFLRQNPRETVLMRLKEEHTPEDGSRSFEEILKGYWDNPSYKNYFWQPAGSGNGSGVNANPELKDVRGKIVLLQNFAVSKAYGINYGNLEKQDHDNVRFSMDGMYTKWTEVKNHLNKANSDQNKIHLNHLSGNGGTSGADPQFVANGYGTDEPLMGTGSPSQYPDFPTENYRLYYGGMNIMTPQYLSRSGLQHTGIVAADFPGKGLVERIIRLNDKHIADIRHISISVEIPANSAAKLTLYSTTGATIGQQFMGNPNPVEINVSFSFSIPDDVIYDKYTLEISPLNTRKRELLAELF

SEQ ID NO: 374 - protein, 307 aa, Bacillus sp.
VTALYYHPFPYSNQLQNHHLYYKHNTLANPLSYHSNAYQFYDHQRNPIIYYNPYQNGSYHYRPDTIKAEVYLAGILCEQAGSGELNDLEIYGNIMANDTLLWNVDSNHHVKILESNLYPIQVTKQIILDSDQALRIHGHLCSNHSLYYCEPYITNDRPAGAAVSGIITAIDSAGSAVEKVQNTLKGFNKPRSVVLEIDNNTDLTFTKSSEQHLYGDWAAMPPDKIPPKTAVVFGSQSPGSSSIRGTEGWMWFTASGLAIRIYWENPMWGTKKCDVEIYGEDADKYRIDKNCSSNDIGALLRYEIYPR

SEQ ID NO: 375 - protein, 304 aa, Artificial Sequence
  source: /note="Description of Artificial Sequence: Synthetic polypeptide"
MYYHPFPYSNQLQNHHLYYKHNTLANPLSYHSNAYQFYDHQRNPIIYYNPYQNGSYHYRPDTIKAEVYLAGILCEQAGSGELNDLEIYGNIMANDTLLWNVDSNHHVKILESNLYPIQVTKQIILDSDQALRIHGHLCSNHSLYYCEPYITNDRPAGAAVSGIITAIDSAGSAVEKVQNTLKGFNKPRSVVLEIDNNTDLTFTKSSEQHLYGDWAAMPPDKIPPKTAVVFGSQSPGSSSIRGTEGWMWFTASGLAIRIYWENPMWGTKKCDVEIYGEDADKYRIDKNCSSNDIGALLRYEIYPR

SEQ ID NO: 376 - protein, 373 aa, Unknown
  source: /note="Description of Unknown: Organism from environmental sample"
VGKSMTFKVGMKYMFKNKNSRKYLDISGNQTGNNANVQQYEYLADAPSERFFLHPLDNNYYAIINVNSGKVIDISGNQTGNNANIQQYEWLGDEPSEYWYFHREADGHYVIESKLSGKVLDIAGNQTGNNANVQQYEFIANAPSERFAVEEAGSVSLPSINTQPLPPVPEYETINDQLPKETERVVTSFTIVPSISVKDPHYGGDTARQIKENPYYMVVKKQWWKKQESYVLAPSERYDFVSTTGIRVTDQETATKTVSWSIGADMGFSFKGFSMGMSSQYSQELQTSISHTTEQLKEETHEHHVTNPFPERMAYSRYILTTEYCVQRKNGTIVNSPWTMTDKTNAHAVTFPKSTGNLFNESTKQISKTKSVN

SEQ ID NO: 377 - protein, 369 aa, Artificial Sequence
  source: /note="Description of Artificial Sequence: Synthetic polypeptide"
MTFKVGMKYMFKNKNSRKYLDISGNQTGNNANVQQYEYLADAPSERFFLHPLDNNYYAIINVNSGKVIDISGNQTGNNANIQQYEWLGDEPSEYWYFHREADGHYVIESKLSGKVLDIAGNQTGNNANVQQYEFIANAPSERFAVEEAGSVSLPSINTQPLPPVPEYETINDQLPKETERVVTSFTIVPSISVKDPHYGGDTARQIKENPYYMVVKKQWWKKQESYVLAPSERYDFVSTTGIRVTDQETATKTVSWSIGADMGFSFKGFSMGMSSQYSQELQTSISHTTEQLKEETHEHHVTNPFPERMAYSRYILTTEYCVQRKNGTIVNSPWTMTDKTNAHAVTFPKSTGNLFNESTKQISKTKSVN

SEQ ID NO: 378 - protein, 359 aa, Bacillus sp.
MFRRIFKMKKYKKVFLVAPIACMLSGGVSDLPNLGIVYAQEINGSELMKPDDQWRQGDHYSKENLAETVAMRVRHSIDATPSLRAKFKMKEGEKVDSSCQAYIEDTLLHNLQLAAEGSIDIEPHVDSYTDLGQTNLLTYNNDEGVSDQTAQTTSTTIRETETHTYSNSEGIKLGIEGGYTLDFTIPYVIDETTIIKVNGSVSYDHTDSNTKTQETAITFPSQTVVAAKGGTTTYYGSVTRANFSGSFKSDAHIAGGVTLTLPIVKSYIDTAGMHTETATLSAEDIYDIFVASTIPLPPYLALDSNGKSVVMTEKTTFNIQGQGGYYSRMQVKFVPKNKTKKPSIMPYEEYVQKVKQGLL

SEQ ID NO: 379 - protein, 352 aa, Artificial Sequence
  source: /note="Description of Artificial Sequence: Synthetic polypeptide"
MKKYKKVFLVAPIACMLSGGVSDLPNLGIVYAQEINGSELMKPDDQWRQGDHYSKENLAETVAMRVRHSIDATPSLRAKFKMKEGEKVDSSCQAYIEDTLLHNLQLAAEGSIDIEPHVDSYTDLGQTNLLTYNNDEGVSDQTAQTTSTTIRETETHTYSNSEGIKLGIEGGYTLDFTIPYVIDETTIIKVNGSVSYDHTDSNTKTQETAITFPSQTVVAAKGGTTTYYGSVTRANFSGSFKSDAHIAGGVTLTLPIVKSYIDTAGMHTETATLSAEDIYDIFVASTIPLPPYLALDSNGKSVVMTEKTTFNIQGQGGYYSRMQVKFVPKNKTKKPSIMPYEEYVQKVKQGLL

SEQ ID NO: 380 - protein, 328 aa, Lysinibacillus sp.
MKKFKNTVLTMVAVTSIGTTFVLTSPITASAAQNSVENITANERIQTKSELEDAKIPIENLVNHFVKNLNKYYPEKVQGTYREEKDPKIIYNHLTFNQFSVQADGSPVITNSENVYVGRETLTNNTATEQMLTTQSFSKTISHTVTSSTTHGFKFGTKATAKFNIPFVGETGIELSAEYDFSNTDSLENSESYTYIVSPQNIRVPAYSSVEVIVVLNTAKMNGNVKLLANASGTITASPFYTFPQYPNIDFYAYIENMKLNEIARVVSQEHLKHISANSDGETINVIGSGQYEAKYGTSSSVTVNPVNVKRNAAGYTYNIIPTIEREN

SEQ ID NO: 381 - protein, 298 aa, Artificial Sequence
  source: /note="Description of Artificial Sequence: Synthetic polypeptide"
MAQNSVENITANERIQTKSELEDAKIPIENLVNHFVKNLNKYYPEKVQGTYREEKDPKIIYNHLTFNQFSVQADGSPVITNSENVYVGRETLTNNTATEQMLTTQSFSKTISHTVTSSTTHGFKFGTKATAKFNIPFVGETGIELSAEYDFSNTDSLENSESYTYIVSPQNIRVPAYSSVEVIVVLNTAKMNGNVKLLANASGTITASPFYTFPQYPNIDFYAYIENMKLNEIARVVSQEHLKHISANSDGETINVIGSGQYEAKYGTSSSVTVNPVNVKRNAAGYTYNIIPTIEREN

SEQ ID NO: 382 - protein, 339 aa, Unknown
  source: /note="Description of Unknown: Organism from environmental sample"
MLKNNKKTKQILSLAMIGVIGTSFAFASPNSASAASTPQVNPIAAGQENPYIENWDEPFKKMFSMLQNNVAQYKNYKNPQFVLKKVVKTSVEEDGSPITNAKTLFVGKTVFRNNTDHDQTFTTNEFSKTIEHSVSNSTTHGFNLGVTASASFGIPVIGETSVEISTEYNFSNTNETTKTESYTYTASPQNIVVPAQSAVEVSVILNTVKIDGNVDLTSTITGTVNYEDGSRKTNNNLQNLWYDAFRYSNTQTSAFNVKPVYEYSDGLSDKVTLKGKGKYSAEYGTQFSVSVKPIVEQPRALAVQSDGTVAENGKSTDEDYTTTNEGYTYTVKPEVKIGQ

SEQ ID NO: 383 - protein, 306 aa, Artificial Sequence
  source: /note="Description of Artificial Sequence: Synthetic polypeptide"
MASTPQVNPIAAGQENPYIENWDEPFKKMFSMLQNNVAQYKNYKNPQFVLKKVVKTSVEEDGSPITNAKTLFVGKTVFRNNTDHDQTFTTNEFSKTIEHSVSNSTTHGFNLGVTASASFGIPVIGETSVEISTEYNFSNTNETTKTESYTYTASPQNIVVPAQSAVEVSVILNTVKIDGNVDLTSTITGTVNYEDGSRKTNNNLQNLWYDAFRYSNTQTSAFNVKPVYEYSDGLSDKVTLKGKGKYSAEYGTQFSVSVKPIVEQPRALAVQSDGTVAENGKSTDEDYTTTNEGYTYTVKPEVKIGQ

SEQ ID NO: 384 - protein, 325 aa, Unknown
  source: /note="Description of Unknown: Organism from environmental sample"
MMKITKYKKLLATVPLACMLSAPVIAAPVNAFAAAPTNYQETSPFSKDSFRDWLDEKISPAFADPVKQIYTGVSSASIALNGNYANLGSGDINLTADAVSDGTPKYVSVGTLHNTTDVDQVLKTDSQAITNTHSFTETNTEGVALKIGTETKVSVGIPFLAEGNVTLKMEVDTSYTHTTGNTYTKTTTDTFPSQDIKAAPHGTTEMNIAIFNQEYSGTYDGYTEVTATIGQADYINQTSDLGVMSLYDFIKKGMDKDPSISLPSYLKLDDINKKVLVKVPMSFSGIAGYHTKGEVTFTPDDPNKPAVKMSLEDYKDPVKRAQLLK

SEQ ID NO: 385 - protein, 293 aa, Artificial Sequence
  source: /note="Description of Artificial Sequence: Synthetic polypeptide"
MAAPTNYQETSPFSKDSFRDWLDEKISPAFADPVKQIYTGVSSASIALNGNYANLGSGDINLTADAVSDGTPKYVSVGTLHNTTDVDQVLKTDSQAITNTHSFTETNTEGVALKIGTETKVSVGIPFLAEGNVTLKMEVDTSYTHTTGNTYTKTTTDTFPSQDIKAAPHGTTEMNIAIFNQEYSGTYDGYTEVTATIGQADYINQTSDLGVMSLYDFIKKGMDKDPSISLPSYLKLDDINKKVLVKVPMSFSGIAGYHTKGEVTFTPDDPNKPAVKMSLEDYKDPVKRAQLLK

SEQ ID NO: 386 - protein, 946 aa, Bacillus sp.
MQLKNVYKCLTITALIAQIAVFPSSSVAEKTKTKRESAPKTEQQPKDKQADVGLVGYYFIDNQFNESAFVQTGEKGKLLDTKKVKQDLSQVKSIRWEGNIKPSKTGAYILATSSNKHVTMKINGETIIQQADMEKAMKLEKEKNYSITIEYLVPDSGKELQLFWEMGGEEKVQIPDNNILSPNFSETIELQSRSGQQPATSGDFDGDGISDSLEENGYTFKDAAIVPWKDEYASQGYKKYTSNSRKAKTSADPYTDFEKVIGRMPEATKREARDPLVAAYPSVGVGMEKFHFSKNENVQEGASGTKTKTVTDTSTTTHSVDIGGSIGWGDKGPSFTFSPKYTHSWSNSTSVADSESDTWSSQIGTNPSEAAYLNANVRYYNGGNAPIYDLRPTSNFVLQNSSESIATITANANTIGNSLGPSATYPAKGQAPISLTQANEAGTIKISVNSETLDKIQEGTETLNIETTQNRGQYGKIDEGGNQIPGGEWDPIRTNIDAISGALTLNLGPAKESLERRVAAKDLRDPEDKTPEITIKEAIKKAFDAEEVGGRLIYKDSNGKDIVLDESAVNVVTDENTKKEIDAQLANMPDKKVYDVKWKRGMKMTLHVPEKYFDFEKSDTEFYYTYGESGGYTGSKRGRINAGGNGYSKENLQLKPYTSYTARAYVKSDSSNGLSDVIFYVDNNKGEGNGAKVNGKVNGQQWQQIEFSFNTGANPEYFSNIGFKNNGNAQLHFDEVSVTEWTETENIKIAHGVETWDAYFDNDSQKTAYIDQIKFSRIPNSKVRYQLRYNGTDWKPILPDSSVEDNGNQRTLHIGQRTGGLAGPRANSRVEVYAVDEHNENLKVKIADNEMQAKLFPQYTRFFKKQIHNAYTFEIKTGPSAPSAMYKFKNNTKNQVHNLWSAGSNTSMWVDWLNYSPEDEYSLIATINEKEYVLFTEKGKDIPGDK

SEQ ID NO: 387 - protein, 919 aa, Artificial Sequence
  source: /note="Description of Artificial Sequence: Synthetic polypeptide"
MEKTKTKRESAPKTEQQPKDKQADVGLVGYYFIDNQFNESAFVQTGEKGKLLDTKKVKQDLSQVKSIRWEGNIKPSKTGAYILATSSNKHVTMKINGETIIQQADMEKAMKLEKEKNYSITIEYLVPDSGKELQLFWEMGGEEKVQIPDNNILSPNFSETIELQSRSGQQPATSGDFDGDGISDSLEENGYTFKDAAIVPWKDEYASQGYKKYTSNSRKAKTSADPYTDFEKVIGRMPEATKREARDPLVAAYPSVGVGMEKFHFSKNENVQEGASGTKTKTVTDTSTTTHSVDIGGSIGWGDKGPSFTFSPKYTHSWSNSTSVADSESDTWSSQIGTNPSEAAYLNANVRYYNGGNAPIYDLRPTSNFVLQNSSESIATITANANTIGNSLGPSATYPAKGQAPISLTQANEAGTIKISVNSETLDKIQEGTETLNIETTQNRGQYGKIDEGGNQIPGGEWDPIRTNIDAISGALTLNLGPAKESLERRVAAKDLRDPEDKTPEITIKEAIKKAFDAEEVGGRLIYKDSNGKDIVLDESAVNVVTDENTKKEIDAQLANMPDKKVYDVKWKRGMKMTLHVPEKYFDFEKSDTEFYYTYGESGGYTGSKRGRINAGGNGYSKENLQLKPYTSYTARAYVKSDSSNGLSDVIFYVDNNKGEGNGAKVNGKVNGQQWQQIEFSFNTGANPEYFSNIGFKNNGNAQLHFDEVSVTEWTETENIKIAHGVETWDAYFDNDSQKTAYIDQIKFSRIPNSKVRYQLRYNGTDWKPILPDSSVEDNGNQRTLHIGQRTGGLAGPRANSRVEVYAVDEHNENLKVKIADNEMQAKLFPQYTRFFKKQIHNAYTFEIKTGPSAPSAMYKFKNNTKNQVHNLWSAGSNTSMWVDWLNYSPEDEYSLIATINEKEYVLFTEKGKDIPGDK

SEQ ID NO: 388 - protein, 374 aa, Unknown
  source: /note="Description of Unknown: Organism from environmental sample"
VMSNENNMNNSMINDENLIPSEVLASGKQISFPDFNFYKIRTFCGKYVDIRGGSTDVMGAVQYSGNNGDNQKFLILTLDNNYSVIAAKHSGKVLDVMKFPFPINEDILIQYDFKNGENQKFFISNDGTIAVKKDGKVWDVQGASTKNDVPILSYDYKGVENQKFTLEKSGSVSIKLPTTGTLPPAPDFKTNDINEELPDDTPPVITHATYMPYFMVKDPYYNAQQKIQNTPYYILVRRQYWQKVTQRILAPSDTYDYSETTGVSRTDQTSMTETTEISIGADLGFMFKGFSVGLSASITKSLSVTKSTSTTESTEITQKVVYTNPFKHQIAYAKYMLINEYYVTRANGEMITSGDASYWKVPDPSRTVARIIPR

SEQ ID NO: 389 - protein, 373 aa, Artificial Sequence
  source: /note="Description of Artificial Sequence: Synthetic polypeptide"
MSNENNMNNSMINDENLIPSEVLASGKQISFPDFNFYKIRTFCGKYVDIRGGSTDVMGAVQYSGNNGDNQKFLILTLDNNYSVIAAKHSGKVLDVMKFPFPINEDILIQYDFKNGENQKFFISNDGTIAVKKDGKVWDVQGASTKNDVPILSYDYKGVENQKFTLEKSGSVSIKLPTTGTLPPAPDFKTNDINEELPDDTPPVITHATYMPYFMVKDPYYNAQQKIQNTPYYILVRRQYWQKVTQRILAPSDTYDYSETTGVSRTDQTSMTETTEISIGADLGFMFKGFSVGLSASITKSLSVTKSTSTTESTEITQKVVYTNPFKHQIAYAKYMLINEYYVTRANGEMITSGDASYWKVPDPSRTVARIIPR

SEQ ID NO: 390 - protein, 396 aa, Bacillus sp.
MKSISKKVMAGLLVGATSLSIWAPASEAAELEKNRYYTITLKANSNIGWDVYEQATYDDAGIRLYGNGAKDNERFLFFPLDGGSYAIVNKNSGKAVTTGSGWIAPNTLSHNPEALKQAKWTGAATDKWNLRDAGNGYHEIVNQGYGKVASYAKAGIGPLGVDFVDLDNSNPSDPDRVFKIFDGTVEFFGQQMKLFDDTFSLPNLPATGTRPDAPNYTGGVDQQLPQTSNSVVVGASLLPCIMVNDSQVSDYTKIHNSPYYTLVKEEYWDKTFSKVIQPGLSEAYQYKTGVSSVDQQKMTDTLSMKFGADLGLKFGDASASLKSEISRTIQTEISTTNSEATEETRSYTATGEPGKETAYTQYQLATKYTLKRADGSIVSDPWVVKNDKITVTRKTS

SEQ ID NO: 391 - protein, 369 aa, Artificial Sequence
  source: /note="Description of Artificial Sequence: Synthetic polypeptide"
MAELEKNRYYTITLKANSNIGWDVYEQATYDDAGIRLYGNGAKDNERFLFFPLDGGSYAIVNKNSGKAVTTGSGWIAPNTLSHNPEALKQAKWTGAATDKWNLRDAGNGYHEIVNQGYGKVASYAKAGIGPLGVDFVDLDNSNPSDPDRVFKIFDGTVEFFGQQMKLFDDTFSLPNLPATGTRPDAPNYTGGVDQQLPQTSNSVVVGASLLPCIMVNDSQVSDYTKIHNSPYYTLVKEEYWDKTFSKVIQPGLSEAYQYKTGVSSVDQQKMTDTLSMKFGADLGLKFGDASASLKSEISRTIQTEISTTNSEATEETRSYTATGEPGKETAYTQYQLATKYTLKRADGSIVSDPWVVKNDKITVTRKTS

SEQ ID NO: 392 - protein, 721 aa, Unknown
  source: /note="Description of Unknown: Organism from environmental sample"
MQEKNSLSTGPYNTLSTTAYQQFNNLASKADGLDWEQLLKDVWHDVYNGQITRDYLQLATDNNIDYRALVTTILSYASSFVPFVGPVIGFFIPIIDLIWPPSQPDLFDILRQQIQDLINQALTTDTLNKLQALLQGWKNELDVLATEVKNLTDPKTSTIGGTVNTIHLQFVHDIPQFTLKDYAAYALPLYVQAATMHLGLLKEAISKQTDWGISDSDKTNFLTYLKQWIVKHSENVYTLFVTGLQNIQDDESSQISSADFIYTSTLYGFDIAALWPTFDKWPTNDCPEVYPTQTDLEQTRFLFSDLVGRVDWRGYPSAGDPSTYLYGNFPGELMQISTRTWDRVDQIQQVLDRGYNQSQTYTYGDSGGAANDPINISRDNPLIGVTPRVMSPYVGIMMNFADGTSITNGGSYGYDKRVVAPDNHKVHFVFPWTDELGCQDAVMNAFVFKNLHPENVIGQSDPTTGVFTIKGIPAEKGYIEDGSSLKVVQERLNGTNAVQLPLGPSLVVPITNKLAGEYHIRVRYANPSDSSIDIWQSVNAGKQTLQGGNFTFPSTKNVQDQGYVPGQNGNYRLLTISLPDPISLPLGEIDVRLGQYTSQTQGNLFIDRIEFVPVPAPVTLFSNSYSVYAPFGLPASQTLWSGNTINSRISIEGTADPDSDSGVLQFYQDSTLQKQIDIPGSGQNYKYPNTSIPNGFNKIILSTNHSVYNGIKGTMTISLSN

SEQ ID NO: 393 - protein, 614 aa, Artificial Sequence
  source: /note="Description of Artificial Sequence: Synthetic polypeptide"
MQEKNSLSTGPYNTLSTTAYQQFNNLASKADGLDWEQLLKDVWHDVYNGQITRDYLQLATDNNIDYRALVTTILSYASSFVPFVGPVIGFFIPIIDLIWPPSQPDLFDILRQQIQDLINQALTTDTLNKLQALLQGWKNELDVLATEVKNLTDPKTSTIGGTVNTIHLQFVHDIPQFTLKDYAAYALPLYVQAATMHLGLLKEAISKQTDWGISDSDKTNFLTYLKQWIVKHSENVYTLFVTGLQNIQDDESSQISSADFIYTSTLYGFDIAALWPTFDKWPTNDCPEVYPTQTDLEQTRFLFSDLVGRVDWRGYPSAGDPSTYLYGNFPGELMQISTRTWDRVDQIQQVLDRGYNQSQTYTYGDSGGAANDPINISRDNPLIGVTPRVMSPYVGIMMNFADGTSITNGGSYGYDKRVVAPDNHKVHFVFPWTDELGCQDAVMNAFVFKNLHPENVIGQSDPTTGVFTIKGIPAEKGYIEDGSSLKVVQERLNGTNAVQLPLGPSLVVPITNKLAGEYHIRVRYANPSDSSIDIWQSVNAGKQTLQGGNFTFPSTKNVQDQGYVPGQNGNYRLLTISLPDPISLPLGEIDVRLGQYTSQTQGNLFIDRIEFVPV
